United States Patent Application Publication US 2026/0176620 A1 - sequence listing, part 2

SEQ ID NO: 3010 - RNA, 21 nt, synthetic construct
  source 1..21: mol_type = other RNA
  modified_base 1: mod_base = OTHER; note = 2'-O-methylguanosine with phosphorothioate linkage
  modified_base 2: mod_base = OTHER; note = 2'-O-methyluridine with phosphorothioate linkage
  modified_base 3: mod_base = OTHER; note = 2'-O-methyladenosine
  modified_base 4: mod_base = OTHER; note = 2'-O-methyladenosine
  modified_base 5: mod_base = OTHER; note = 2'-O-methyladenosine
  modified_base 6: mod_base = OTHER; note = 2'-O-methylguanosine
  modified_base 7: mod_base = OTHER; note = 2'-fluoroadenosine
  modified_base 8: mod_base = OTHER; note = 2'-O-methyluridine
  modified_base 9: mod_base = OTHER; note = 2'-fluoroguanosine
  modified_base 10: mod_base = OTHER; note = 2'-fluoroadenosine
  modified_base 11: mod_base = OTHER; note = 2'-fluoroguanosine
  modified_base 12: mod_base = OTHER; note = 2'-O-methylcytidine
  modified_base 13: mod_base = OTHER; note = 2'-O-methylcytidine
  modified_base 14: mod_base = OTHER; note = 2'-O-methylcytidine
  modified_base 15: mod_base = OTHER; note = 2'-O-methyladenosine
  modified_base 16: mod_base = OTHER; note = 2'-O-methylguanosine
  modified_base 17: mod_base = OTHER; note = 2'-O-methylcytidine
  modified_base 18: mod_base = OTHER; note = 2'-O-methyladenosine
  modified_base 19: mod_base = OTHER; note = 2'-O-methylguanosine with phosphorothioate linkage
  modified_base 20: mod_base = OTHER; note = 2'-O-methylcytidine with phosphorothioate linkage
  modified_base 21: mod_base = OTHER; note = 2'-O-methyladenosine
gtaaagatgagcccagcagca

SEQ ID NO: 3011 - RNA, 21 nt, synthetic construct
  source 1..21: mol_type = other RNA
  modified_base 1: mod_base = OTHER; note = 2'-O-methyluridine with phosphorothioate linkage
  modified_base 2: mod_base = OTHER; note = 2'-O-methyladenosine with phosphorothioate linkage
  modified_base 3: mod_base = OTHER; note = 2'-O-methyladenosine
  modified_base 4: mod_base = OTHER; note = 2'-O-methyladenosine
  modified_base 5: mod_base = OTHER; note = 2'-O-methylguanosine
  modified_base 6: mod_base = OTHER; note = 2'-O-methyladenosine
  modified_base 7: mod_base = OTHER; note = 2'-fluorouridine
  modified_base 8: mod_base = OTHER; note = 2'-O-methylguanosine
  modified_base 9: mod_base = OTHER; note = 2'-fluoroadenosine
  modified_base 10: mod_base = OTHER; note = 2'-fluoroguanosine
  modified_base 11: mod_base = OTHER; note = 2'-fluorocytidine
  modified_base 12: mod_base = OTHER; note = 2'-O-methylcytidine
  modified_base 13: mod_base = OTHER; note = 2'-O-methylcytidine
  modified_base 14: mod_base = OTHER; note = 2'-O-methyladenosine
  modified_base 15: mod_base = OTHER; note = 2'-O-methylguanosine
  modified_base 16: mod_base = OTHER; note = 2'-O-methylcytidine
  modified_base 17: mod_base = OTHER; note = 2'-O-methyladenosine
  modified_base 18: mod_base = OTHER; note = 2'-O-methylguanosine
  modified_base 19: mod_base = OTHER; note = 2'-O-methylcytidine with phosphorothioate linkage
  modified_base 20: mod_base = OTHER; note = 2'-O-methyluridine with phosphorothioate linkage
  modified_base 21: mod_base = OTHER; note = 2'-O-methyladenosine
taaagatgagcccagcagcta

SEQ ID NO: 3012 - RNA, 21 nt, synthetic construct
  source 1..21: mol_type = other RNA
  modified_base 1: mod_base = OTHER; note = 2'-O-methyladenosine with phosphorothioate linkage
  modified_base 2: mod_base = OTHER; note = 2'-O-methyladenosine with phosphorothioate linkage
  modified_base 3: mod_base = OTHER; note = 2'-O-methylguanosine
  modified_base 4: mod_base = OTHER; note = 2'-O-methyladenosine
  modified_base 5: mod_base = OTHER; note = 2'-O-methyluridine
  modified_base 6: mod_base = OTHER; note = 2'-O-methylguanosine
  modified_base 7: mod_base = OTHER; note = 2'-fluoroadenosine
  modified_base 8: mod_base = OTHER; note = 2'-O-methylguanosine
  modified_base 9: mod_base = OTHER; note = 2'-fluorocytidine
  modified_base 10: mod_base = OTHER; note = 2'-fluorocytidine
  modified_base 11: mod_base = OTHER; note = 2'-fluorocytidine
  modified_base 12: mod_base = OTHER; note = 2'-O-methyladenosine
  modified_base 13: mod_base = OTHER; note = 2'-O-methylguanosine
  modified_base 14: mod_base = OTHER; note = 2'-O-methylcytidine
  modified_base 15: mod_base = OTHER; note = 2'-O-methyladenosine
  modified_base 16: mod_base = OTHER; note = 2'-O-methylguanosine
  modified_base 17: mod_base = OTHER; note = 2'-O-methylcytidine
  modified_base 18: mod_base = OTHER; note = 2'-O-methyluridine
  modified_base 19: mod_base = OTHER; note = 2'-O-methyladenosine with phosphorothioate linkage
  modified_base 20: mod_base = OTHER; note = 2'-O-methylcytidine with phosphorothioate linkage
  modified_base 21: mod_base = OTHER; note = 2'-O-methyladenosine
aagatgagcccagcagctaca

SEQ ID NO: 3013 - RNA, 21 nt, synthetic construct
  source 1..21: mol_type = other RNA
  modified_base 1: mod_base = OTHER; note = 2'-O-methyladenosine with phosphorothioate linkage
  modified_base 2: mod_base = OTHER; note = 2'-O-methylguanosine with phosphorothioate linkage
  modified_base 3: mod_base = OTHER; note = 2'-O-methyladenosine
  modified_base 4: mod_base = OTHER; note = 2'-O-methyluridine
  modified_base 5: mod_base = OTHER; note = 2'-O-methylguanosine
  modified_base 6: mod_base = OTHER; note = 2'-O-methyladenosine
  modified_base 7: mod_base = OTHER; note = 2'-fluoroguanosine
  modified_base 8: mod_base = OTHER; note = 2'-O-methylcytidine
  modified_base 9: mod_base = OTHER; note = 2'-fluorocytidine
  modified_base 10: mod_base = OTHER; note = 2'-fluorocytidine
  modified_base 11: mod_base = OTHER; note = 2'-fluoroadenosine
  modified_base 12: mod_base = OTHER; note = 2'-O-methylguanosine
  modified_base 13: mod_base = OTHER; note = 2'-O-methylcytidine
  modified_base 14: mod_base = OTHER; note = 2'-O-methyladenosine
  modified_base 15: mod_base = OTHER; note = 2'-O-methylguanosine
  modified_base 16: mod_base = OTHER; note = 2'-O-methylcytidine
  modified_base 17: mod_base = OTHER; note = 2'-O-methyluridine
  modified_base 18: mod_base = OTHER; note = 2'-O-methyladenosine
  modified_base 19: mod_base = OTHER; note = 2'-O-methylcytidine with phosphorothioate linkage
  modified_base 20: mod_base = OTHER; note = 2'-O-methyladenosine with phosphorothioate linkage
  modified_base 21: mod_base = OTHER; note = 2'-O-methyladenosine
agatgagcccagcagctacaa

SEQ ID NO: 3014 - RNA, 21 nt, synthetic construct
  source 1..21: mol_type = other RNA
  modified_base 1: mod_base = OTHER; note = 2'-O-methylguanosine with phosphorothioate linkage
  modified_base 2: mod_base = OTHER; note = 2'-O-methyladenosine with phosphorothioate linkage
  modified_base 3: mod_base = OTHER; note = 2'-O-methyluridine
  modified_base 4: mod_base = OTHER; note = 2'-O-methylguanosine
  modified_base 5: mod_base = OTHER; note = 2'-O-methyladenosine
  modified_base 6: mod_base = OTHER; note = 2'-O-methylguanosine
  modified_base 7: mod_base = OTHER; note = 2'-fluorocytidine
  modified_base 8: mod_base = OTHER; note = 2'-O-methylcytidine
  modified_base 9: mod_base = OTHER; note = 2'-fluorocytidine
  modified_base 10: mod_base = OTHER; note = 2'-fluoroadenosine
  modified_base 11: mod_base = OTHER; note = 2'-fluoroguanosine
  modified_base 12: mod_base = OTHER; note = 2'-O-methylcytidine
  modified_base 13: mod_base = OTHER; note = 2'-O-methyladenosine
  modified_base 14: mod_base = OTHER; note = 2'-O-methylguanosine
  modified_base 15: mod_base = OTHER; note = 2'-O-methylcytidine
  modified_base 16: mod_base = OTHER; note = 2'-O-methyluridine
  modified_base 17: mod_base = OTHER; note = 2'-O-methyladenosine
  modified_base 18: mod_base = OTHER; note = 2'-O-methylcytidine
  modified_base 19: mod_base = OTHER; note = 2'-O-methyladenosine with phosphorothioate linkage
  modified_base 20: mod_base = OTHER; note = 2'-O-methylcytidine with phosphorothioate linkage
  modified_base 21: mod_base = OTHER; note = 2'-O-methyladenosine
gatgagcccagcagctacaca

SEQ ID NO: 3015 - RNA, 21 nt, synthetic construct
  source 1..21: mol_type = other RNA
  modified_base 1: mod_base = OTHER; note = 2'-O-methyladenosine with phosphorothioate linkage
  modified_base 2: mod_base = OTHER; note = 2'-O-methyluridine with phosphorothioate linkage
  modified_base 3: mod_base = OTHER; note = 2'-O-methylguanosine
  modified_base 4: mod_base = OTHER; note = 2'-O-methyladenosine
  modified_base 5: mod_base = OTHER; note = 2'-O-methylguanosine
  modified_base 6: mod_base = OTHER; note = 2'-O-methylcytidine
  modified_base 7: mod_base = OTHER; note = 2'-fluorocytidine
  modified_base 8: mod_base = OTHER; note = 2'-O-methylcytidine
  modified_base 9: mod_base = OTHER; note = 2'-fluoroadenosine
  modified_base 10: mod_base = OTHER; note = 2'-fluoroguanosine
  modified_base 11: mod_base = OTHER; note = 2'-fluorocytidine
  modified_base 12: mod_base = OTHER; note = 2'-O-methyladenosine
  modified_base 13: mod_base = OTHER; note = 2'-O-methylguanosine
  modified_base 14: mod_base = OTHER; note = 2'-O-methylcytidine
  modified_base 15: mod_base = OTHER; note = 2'-O-methyluridine
  modified_base 16: mod_base = OTHER; note = 2'-O-methyladenosine
  modified_base 17: mod_base = OTHER; note = 2'-O-methylcytidine
  modified_base 18: mod_base = OTHER; note = 2'-O-methyladenosine
  modified_base 19: mod_base = OTHER; note = 2'-O-methylcytidine with phosphorothioate linkage
  modified_base 20: mod_base = OTHER; note = 2'-O-methyladenosine with phosphorothioate linkage
  modified_base 21: mod_base = OTHER; note = 2'-O-methyladenosine
atgagcccagcagctacacaa

SEQ ID NO: 3016 - RNA, 21 nt, synthetic construct
  source 1..21: mol_type = other RNA
  modified_base 1: mod_base = OTHER; note = 2'-O-methyluridine with phosphorothioate linkage
  modified_base 2: mod_base = OTHER; note = 2'-O-methylguanosine with phosphorothioate linkage
  modified_base 3: mod_base = OTHER; note = 2'-O-methyladenosine
  modified_base 4: mod_base = OTHER; note = 2'-O-methylguanosine
  modified_base 5: mod_base = OTHER; note = 2'-O-methylcytidine
  modified_base 6: mod_base = OTHER; note = 2'-O-methylcytidine
  modified_base 7: mod_base = OTHER; note = 2'-fluorocytidine
  modified_base 8: mod_base = OTHER; note = 2'-O-methyladenosine
  modified_base 9: mod_base = OTHER; note = 2'-fluoroguanosine
  modified_base 10: mod_base = OTHER; note = 2'-fluorocytidine
  modified_base 11: mod_base = OTHER; note = 2'-fluoroadenosine
  modified_base 12: mod_base = OTHER; note = 2'-O-methylguanosine
  modified_base 13: mod_base = OTHER; note = 2'-O-methylcytidine
  modified_base 14: mod_base = OTHER; note = 2'-O-methyluridine
  modified_base 15: mod_base = OTHER; note = 2'-O-methyladenosine
  modified_base 16: mod_base = OTHER; note = 2'-O-methylcytidine
  modified_base 17: mod_base = OTHER; note = 2'-O-methyladenosine
  modified_base 18: mod_base = OTHER; note = 2'-O-methylcytidine
  modified_base 19: mod_base = OTHER; note = 2'-O-methyladenosine with phosphorothioate linkage
  modified_base 20: mod_base = OTHER; note = 2'-O-methyluridine with phosphorothioate linkage
  modified_base 21: mod_base = OTHER; note = 2'-O-methyladenosine
tgagcccagcagctacacata

SEQ ID NO: 3017 - RNA, 21 nt, synthetic construct
  source 1..21: mol_type = other RNA
  modified_base 1: mod_base = OTHER; note = 2'-O-methyladenosine with phosphorothioate linkage
  modified_base 2: mod_base = OTHER; note = 2'-O-methylcytidine with phosphorothioate linkage
  modified_base 3: mod_base = OTHER; note = 2'-O-methyladenosine
  modified_base 4: mod_base = OTHER; note = 2'-O-methylcytidine
  modified_base 5: mod_base = OTHER; note = 2'-O-methyladenosine
  modified_base 6: mod_base = OTHER; note = 2'-O-methyluridine
  modified_base 7: mod_base = OTHER; note = 2'-fluoroguanosine
  modified_base 8: mod_base = OTHER; note = 2'-O-methyluridine
  modified_base 9: mod_base = OTHER; note = 2'-fluoroadenosine
  modified_base 10: mod_base = OTHER; note = 2'-fluorocytidine
  modified_base 11: mod_base = OTHER; note = 2'-fluoroadenosine
  modified_base 12: mod_base = OTHER; note = 2'-O-methyladenosine
  modified_base 13: mod_base = OTHER; note = 2'-O-methylcytidine
  modified_base 14: mod_base = OTHER; note = 2'-O-methyluridine
  modified_base 15: mod_base = OTHER; note = 2'-O-methyluridine
  modified_base 16: mod_base = OTHER; note = 2'-O-methylguanosine
  modified_base 17: mod_base = OTHER; note = 2'-O-methylcytidine
  modified_base 18: mod_base = OTHER; note = 2'-O-methyladenosine
  modified_base 19: mod_base = OTHER; note = 2'-O-methyladenosine with phosphorothioate linkage
  modified_base 20: mod_base = OTHER; note = 2'-O-methyladenosine with phosphorothioate linkage
  modified_base 21: mod_base = OTHER; note = 2'-O-methyladenosine
acacatgtacaacttgcaaaa

SEQ ID NO: 3018 - RNA, 21 nt, synthetic construct
  source 1..21: mol_type = other RNA
  modified_base 1: mod_base = OTHER; note = 2'-O-methyladenosine with phosphorothioate linkage
  modified_base 2: mod_base = OTHER; note = 2'-O-methylcytidine with phosphorothioate linkage
  modified_base 3: mod_base = OTHER; note = 2'-O-methyladenosine
  modified_base 4: mod_base = OTHER; note = 2'-O-methyluridine
  modified_base 5: mod_base = OTHER; note = 2'-O-methylguanosine
  modified_base 6: mod_base = OTHER; note = 2'-O-methyluridine
  modified_base 7: mod_base = OTHER; note = 2'-fluoroadenosine
  modified_base 8: mod_base = OTHER; note = 2'-O-methylcytidine
  modified_base 9: mod_base = OTHER; note = 2'-fluoroadenosine
  modified_base 10: mod_base = OTHER; note = 2'-fluoroadenosine
  modified_base 11: mod_base = OTHER; note = 2'-fluorocytidine
  modified_base 12: mod_base = OTHER; note = 2'-O-methyluridine
  modified_base 13: mod_base = OTHER; note = 2'-O-methyluridine
  modified_base 14: mod_base = OTHER; note = 2'-O-methylguanosine
  modified_base 15: mod_base = OTHER; note = 2'-O-methylcytidine
  modified_base 16: mod_base = OTHER; note = 2'-O-methyladenosine
  modified_base 17: mod_base = OTHER; note = 2'-O-methyladenosine
  modified_base 18: mod_base = OTHER; note = 2'-O-methyladenosine
  modified_base 19: mod_base = OTHER; note = 2'-O-methylcytidine with phosphorothioate linkage
  modified_base 20: mod_base = OTHER; note = 2'-O-methyladenosine with phosphorothioate linkage
  modified_base 21: mod_base = OTHER; note = 2'-O-methyladenosine
acatgtacaacttgcaaacaa

SEQ ID NO: 3019 - RNA, 21 nt, synthetic construct
  source 1..21: mol_type = other RNA
  modified_base 1: mod_base = OTHER; note = 2'-O-methyluridine with phosphorothioate linkage
  modified_base 2: mod_base = OTHER; note = 2'-O-methylguanosine with phosphorothioate linkage
  modified_base 3: mod_base = OTHER; note = 2'-O-methylcytidine
  modified_base 4: mod_base = OTHER; note = 2'-O-methyladenosine
  modified_base 5: mod_base = OTHER; note = 2'-O-methyladenosine
  modified_base 6: mod_base = OTHER; note = 2'-O-methylcytidine
  modified_base 7: mod_base = OTHER; note = 2'-fluoroadenosine
  modified_base 8: mod_base = OTHER; note = 2'-O-methylcytidine
  modified_base 9: mod_base = OTHER; note = 2'-fluoroguanosine
  modified_base 10: mod_base = OTHER; note = 2'-fluorocytidine
  modified_base 11: mod_base = OTHER; note = 2'-fluoroadenosine
  modified_base 12: mod_base = OTHER; note = 2'-O-methylcytidine
  modified_base 13: mod_base = OTHER; note = 2'-O-methyladenosine
  modified_base 14: mod_base = OTHER; note = 2'-O-methylguanosine
  modified_base 15: mod_base = OTHER; note = 2'-O-methyladenosine
  modified_base 16: mod_base = OTHER; note = 2'-O-methyladenosine
  modified_base 17: mod_base = OTHER; note = 2'-O-methylcytidine
  modified_base 18: mod_base = OTHER; note = 2'-O-methyladenosine
  modified_base 19: mod_base = OTHER; note = 2'-O-methylcytidine with phosphorothioate linkage
  modified_base 20: mod_base = OTHER; note = 2'-O-methyluridine with phosphorothioate linkage
  modified_base 21: mod_base = OTHER; note = 2'-O-methyladenosine
tgcaacacgcacagaacacta

SEQ ID NO: 3020 - RNA, 21 nt, synthetic construct
  source 1..21: mol_type = other RNA
  modified_base 1: mod_base = OTHER; note = 2'-O-methylguanosine with phosphorothioate linkage
  modified_base 2: mod_base = OTHER; note = 2'-O-methylcytidine with phosphorothioate linkage
  modified_base 3: mod_base = OTHER; note = 2'-O-methyladenosine
  modified_base 4: mod_base = OTHER; note = 2'-O-methyladenosine
  modified_base 5: mod_base = OTHER; note = 2'-O-methylcytidine
  modified_base 6: mod_base = OTHER; note = 2'-O-methyladenosine
  modified_base 7: mod_base = OTHER; note = 2'-fluorocytidine
  modified_base 8: mod_base = OTHER; note = 2'-O-methylguanosine
  modified_base 9: mod_base = OTHER; note = 2'-fluorocytidine
  modified_base 10: mod_base = OTHER; note = 2'-fluoroadenosine
  modified_base 11: mod_base = OTHER; note = 2'-fluorocytidine
  modified_base 12: mod_base = OTHER; note = 2'-O-methyladenosine
  modified_base 13: mod_base = OTHER; note = 2'-O-methylguanosine
  modified_base 14: mod_base = OTHER; note = 2'-O-methyladenosine
  modified_base 15: mod_base = OTHER; note = 2'-O-methyladenosine
  modified_base 16: mod_base = OTHER; note = 2'-O-methylcytidine
  modified_base 17: mod_base = OTHER; note = 2'-O-methyladenosine
  modified_base 18: mod_base = OTHER; note = 2'-O-methylcytidine
  modified_base 19: mod_base = OTHER; note = 2'-O-methyluridine with phosphorothioate linkage
  modified_base 20: mod_base = OTHER; note = 2'-O-methylcytidine with phosphorothioate linkage
  modified_base 21: mod_base = OTHER; note = 2'-O-methyladenosine
gcaacacgcacagaacactca

SEQ ID NO: 3021 - RNA, 21 nt, synthetic construct
  source 1..21: mol_type = other RNA
  modified_base 1: mod_base = OTHER; note = 2'-O-methylcytidine with phosphorothioate linkage
  modified_base 2: mod_base = OTHER; note = 2'-O-methyladenosine with phosphorothioate linkage
  modified_base 3: mod_base = OTHER; note = 2'-O-methyladenosine
  modified_base 4: mod_base = OTHER; note = 2'-O-methylcytidine
  modified_base 5: mod_base = OTHER; note = 2'-O-methyladenosine
  modified_base 6: mod_base = OTHER; note = 2'-O-methylcytidine
  modified_base 7: mod_base = OTHER; note = 2'-fluoroguanosine
  modified_base 8: mod_base = OTHER; note = 2'-O-methylcytidine
  modified_base 9: mod_base = OTHER; note = 2'-fluoroadenosine
  modified_base 10: mod_base = OTHER; note = 2'-fluorocytidine
  modified_base 11: mod_base = OTHER; note = 2'-fluoroadenosine
  modified_base 12: mod_base = OTHER; note = 2'-O-methylguanosine
  modified_base 13: mod_base = OTHER; note = 2'-O-methyladenosine
  modified_base 14: mod_base = OTHER; note = 2'-O-methyladenosine
  modified_base 15: mod_base = OTHER; note = 2'-O-methylcytidine
  modified_base 16: mod_base = OTHER; note = 2'-O-methyladenosine
  modified_base 17: mod_base = OTHER; note = 2'-O-methylcytidine
  modified_base 18: mod_base = OTHER; note = 2'-O-methyluridine
  modified_base 19: mod_base = OTHER; note = 2'-O-methylcytidine with phosphorothioate linkage
  modified_base 20: mod_base = OTHER; note = 2'-O-methyladenosine with phosphorothioate linkage
  modified_base 21: mod_base = OTHER; note = 2'-O-methyladenosine
caacacgcacagaacactcaa

SEQ ID NO: 3022 - RNA, 21 nt, synthetic construct
  source 1..21: mol_type = other RNA
  modified_base 1: mod_base = OTHER; note = 2'-O-methyladenosine with phosphorothioate linkage
  modified_base 2: mod_base = OTHER; note = 2'-O-methyladenosine with phosphorothioate linkage
  modified_base 3: mod_base = OTHER; note = 2'-O-methylcytidine
  modified_base 4: mod_base = OTHER; note = 2'-O-methyladenosine
  modified_base 5: mod_base = OTHER; note = 2'-O-methylcytidine
  modified_base 6: mod_base = OTHER; note = 2'-O-methylguanosine
  modified_base 7: mod_base = OTHER; note = 2'-fluorocytidine
  modified_base 8: mod_base = OTHER; note = 2'-O-methyladenosine
  modified_base 9: mod_base = OTHER; note = 2'-fluorocytidine
  modified_base 10: mod_base = OTHER; note = 2'-fluoroadenosine
  modified_base 11: mod_base = OTHER; note = 2'-fluoroguanosine
  modified_base 12: mod_base = OTHER; note = 2'-O-methyladenosine
  modified_base 13: mod_base = OTHER; note = 2'-O-methyladenosine
  modified_base 14: mod_base = OTHER; note = 2'-O-methylcytidine
  modified_base 15: mod_base = OTHER; note = 2'-O-methyladenosine
  modified_base 16: mod_base = OTHER; note = 2'-O-methylcytidine
  modified_base 17: mod_base = OTHER; note = 2'-O-methyluridine
  modified_base 18: mod_base = OTHER; note = 2'-O-methylcytidine
  modified_base 19: mod_base = OTHER; note = 2'-O-methyladenosine with phosphorothioate linkage
  modified_base 20: mod_base = OTHER; note = 2'-O-methyluridine with phosphorothioate linkage
  modified_base 21: mod_base = OTHER; note = 2'-O-methyladenosine
aacacgcacagaacactcata

SEQ ID NO: 3023 - RNA, 21 nt, synthetic construct
  source 1..21: mol_type = other RNA
  modified_base 1: mod_base = OTHER; note = 2'-O-methyladenosine with phosphorothioate linkage
  modified_base 2: mod_base = OTHER; note = 2'-O-methylcytidine with phosphorothioate linkage
  modified_base 3: mod_base = OTHER; note = 2'-O-methyladenosine
  modified_base 4: mod_base = OTHER; note = 2'-O-methylcytidine
  modified_base 5: mod_base = OTHER; note = 2'-O-methylguanosine
  modified_base 6: mod_base = OTHER; note = 2'-O-methylcytidine
  modified_base 7: mod_base = OTHER; note = 2'-fluoroadenosine
  modified_base 8: mod_base = OTHER; note = 2'-O-methylcytidine
  modified_base 9: mod_base = OTHER; note = 2'-fluoroadenosine
  modified_base 10: mod_base = OTHER; note = 2'-fluoroguanosine
  modified_base 11: mod_base = OTHER; note = 2'-fluoroadenosine
  modified_base 12: mod_base = OTHER; note = 2'-O-methyladenosine
  modified_base 13: mod_base = OTHER; note = 2'-O-methylcytidine
  modified_base 14: mod_base = OTHER; note = 2'-O-methyladenosine
  modified_base 15: mod_base = OTHER; note = 2'-O-methylcytidine
  modified_base 16: mod_base = OTHER; note = 2'-O-methyluridine
  modified_base 17: mod_base = OTHER; note = 2'-O-methylcytidine
  modified_base 18: mod_base = OTHER; note = 2'-O-methyladenosine
  modified_base 19: mod_base = OTHER; note = 2'-O-methyluridine with phosphorothioate linkage
  modified_base 20: mod_base = OTHER; note = 2'-O-methylguanosine with phosphorothioate linkage
  modified_base 21: mod_base = OTHER; note = 2'-O-methyladenosine
acacgcacagaacactcatga

SEQ ID NO: 3024 - RNA, 21 nt, synthetic construct
  source 1..21: mol_type = other RNA
  modified_base 1: mod_base = OTHER; note = 2'-O-methylcytidine with phosphorothioate linkage
  modified_base 2: mod_base = OTHER; note = 2'-O-methyladenosine with phosphorothioate linkage
  modified_base 3: mod_base = OTHER; note = 2'-O-methylcytidine
  modified_base 4: mod_base = OTHER; note = 2'-O-methylguanosine
  modified_base 5: mod_base = OTHER; note = 2'-O-methylcytidine
  modified_base 6: mod_base = OTHER; note = 2'-O-methyladenosine
  modified_base 7: mod_base = OTHER; note = 2'-fluorocytidine
  modified_base 8: mod_base = OTHER; note = 2'-O-methyladenosine
  modified_base 9: mod_base = OTHER; note = 2'-fluoroguanosine
  modified_base 10: mod_base = OTHER; note = 2'-fluoroadenosine
  modified_base 11: mod_base = OTHER; note = 2'-fluoroadenosine
  modified_base 12: mod_base = OTHER; note = 2'-O-methylcytidine
  modified_base 13: mod_base = OTHER; note = 2'-O-methyladenosine
  modified_base 14: mod_base = OTHER; note = 2'-O-methylcytidine
  modified_base 15: mod_base = OTHER; note = 2'-O-methyluridine
  modified_base 16: mod_base = OTHER; note = 2'-O-methylcytidine
  modified_base 17: mod_base = OTHER; note = 2'-O-methyladenosine
  modified_base 18: mod_base = OTHER; note = 2'-O-methyluridine
  modified_base 19: mod_base = OTHER; note = 2'-O-methylguanosine with phosphorothioate linkage
  modified_base 20: mod_base = OTHER; note = 2'-O-methylguanosine with phosphorothioate linkage
  modified_base 21: mod_base = OTHER; note = 2'-O-methyladenosine
cacgcacagaacactcatgga

SEQ ID NO: 3025 - RNA, 21 nt, synthetic construct
  source 1..21: mol_type = other RNA
  modified_base 1: mod_base = OTHER; note = 2'-O-methylcytidine with phosphorothioate linkage
  modified_base 2: mod_base = OTHER; note = 2'-O-methylcytidine with phosphorothioate linkage
  modified_base 3: mod_base = OTHER; note = 2'-O-methylcytidine
  modified_base 4: mod_base = OTHER; note = 2'-O-methyluridine
  modified_base 5: mod_base = OTHER; note = 2'-O-methylguanosine
  modified_base 6: mod_base = OTHER; note = 2'-O-methyladenosine
  modified_base 7: mod_base = OTHER; note = 2'-fluorocytidine
  modified_base 8: mod_base = OTHER; note = 2'-O-methylcytidine
  modified_base 9: mod_base = OTHER; note = 2'-fluorocytidine
  modified_base 10: mod_base = OTHER; note = 2'-fluorocytidine
  modified_base 11: mod_base = OTHER; note = 2'-fluoroguanosine
  modified_base 12: mod_base = OTHER; note = 2'-O-methylcytidine
  modified_base 13: mod_base = OTHER; note = 2'-O-methylguanosine
  modified_base 14: mod_base = OTHER; note = 2'-O-methylguanosine
  modified_base 15: mod_base = OTHER; note = 2'-O-methylguanosine
  modified_base 16: mod_base = OTHER; note = 2'-O-methyluridine
  modified_base 17: mod_base = OTHER; note = 2'-O-methyluridine
  modified_base 18: mod_base = OTHER; note = 2'-O-methylguanosine
  modified_base 19: mod_base = OTHER; note = 2'-O-methylguanosine with phosphorothioate linkage
  modified_base 20: mod_base = OTHER; note = 2'-O-methyluridine with phosphorothioate linkage
  modified_base 21: mod_base = OTHER; note = 2'-O-methyladenosine
ccctgaccccgcgggttggta

SEQ ID NO: 3026 - RNA, 21 nt, synthetic construct
  source 1..21: mol_type = other RNA
  modified_base 1: mod_base = OTHER; note = 2'-O-methylcytidine with phosphorothioate linkage
  modified_base 2: mod_base = OTHER; note = 2'-O-methyluridine with phosphorothioate linkage
  modified_base 3: mod_base = OTHER; note = 2'-O-methylguanosine
  modified_base 4: mod_base = OTHER; note = 2'-O-methyladenosine
  modified_base 5: mod_base = OTHER; note = 2'-O-methylcytidine
  modified_base 6: mod_base = OTHER; note = 2'-O-methylcytidine
  modified_base 7: mod_base = OTHER; note = 2'-fluorocytidine
  modified_base 8: mod_base = OTHER; note = 2'-O-methylcytidine
  modified_base 9: mod_base = OTHER; note = 2'-fluoroguanosine
  modified_base 10: mod_base = OTHER; note = 2'-fluorocytidine
  modified_base 11: mod_base = OTHER; note = 2'-fluoroguanosine
  modified_base 12: mod_base = OTHER; note = 2'-O-methylguanosine
  modified_base 13: mod_base = OTHER; note = 2'-O-methylguanosine
  modified_base 14: mod_base = OTHER; note = 2'-O-methyluridine
  modified_base 15: mod_base = OTHER; note = 2'-O-methyluridine
  modified_base 16: mod_base = OTHER; note = 2'-O-methylguanosine
  modified_base 17: mod_base = OTHER; note = 2'-O-methylguanosine
  modified_base 18: mod_base = OTHER; note = 2'-O-methyluridine
  modified_base 19: mod_base = OTHER; note = 2'-O-methyladenosine with phosphorothioate linkage
  modified_base 20: mod_base = OTHER; note = 2'-O-methyluridine with phosphorothioate linkage
  modified_base 21: mod_base = OTHER; note = 2'-O-methyladenosine
ctgaccccgcgggttggtata

SEQ ID NO: 3027 - RNA, 21 nt, synthetic construct
  source 1..21: mol_type = other RNA
  modified_base 1: mod_base = OTHER; note = 2'-O-methylguanosine with phosphorothioate linkage
  modified_base 2: mod_base = OTHER; note = 2'-O-methyladenosine with phosphorothioate linkage
  modified_base 3: mod_base = OTHER; note = 2'-O-methylcytidine
  modified_base 4: mod_base = OTHER; note = 2'-O-methylcytidine
  modified_base 5: mod_base = OTHER; note = 2'-O-methylcytidine
  modified_base 6: mod_base = OTHER; note = 2'-O-methylcytidine
  modified_base 7: mod_base = OTHER; note = 2'-fluoroguanosine
  modified_base 8: mod_base = OTHER; note = 2'-O-methylcytidine
  modified_base 9: mod_base = OTHER; note = 2'-fluoroguanosine
  modified_base 10: mod_base = OTHER; note = 2'-fluoroguanosine
  modified_base 11: mod_base = OTHER; note = 2'-fluoroguanosine
  modified_base 12: mod_base = OTHER; note = 2'-O-methyluridine
  modified_base 13: mod_base = OTHER; note = 2'-O-methyluridine
  modified_base 14: mod_base = OTHER; note = 2'-O-methylguanosine
  modified_base 15: mod_base = OTHER; note = 2'-O-methylguanosine
  modified_base 16: mod_base = OTHER; note = 2'-O-methyluridine
  modified_base 17: mod_base = OTHER; note = 2'-O-methyladenosine
  modified_base 18: mod_base = OTHER; note = 2'-O-methyluridine
  modified_base 19: mod_base = OTHER; note = 2'-O-methylcytidine with phosphorothioate linkage
  modified_base 20: mod_base = OTHER; note = 2'-O-methylcytidine with phosphorothioate linkage
  modified_base 21: mod_base = OTHER; note = 2'-O-methyladenosine
gaccccgcgggttggtatcca

SEQ ID NO: 3028 - RNA, 21 nt, synthetic construct
  source 1..21: mol_type = other RNA
  modified_base 1: mod_base = OTHER; note = 2'-O-methyladenosine with phosphorothioate linkage
  modified_base 2: mod_base = OTHER; note = 2'-O-methylcytidine with phosphorothioate linkage
  modified_base 3: mod_base = OTHER; note = 2'-O-methylcytidine
  modified_base 4: mod_base = OTHER; note = 2'-O-methylcytidine
  modified_base 5: mod_base = OTHER; note = 2'-O-methylcytidine
  modified_base 6: mod_base = OTHER; note = 2'-O-methylguanosine
  modified_base 7: mod_base = OTHER; note = 2'-fluorocytidine
  modified_base 8: mod_base = OTHER; note = 2'-O-methylguanosine
  modified_base 9: mod_base = OTHER; note = 2'-fluoroguanosine
  modified_base 10: mod_base = OTHER; note = 2'-fluoroguanosine
  modified_base 11: mod_base = OTHER; note = 2'-fluorouridine
  modified_base 12: mod_base = OTHER; note = 2'-O-methyluridine
  modified_base 13: mod_base = OTHER; note = 2'-O-methylguanosine
  modified_base 14: mod_base = OTHER; note = 2'-O-methylguanosine
  modified_base 15: mod_base = OTHER; note = 2'-O-methyluridine
  modified_base 16: mod_base = OTHER; note = 2'-O-methyladenosine
  modified_base 17: mod_base = OTHER; note = 2'-O-methyluridine
  modified_base 18: mod_base = OTHER; note = 2'-O-methylcytidine
  modified_base 19: mod_base = OTHER; note = 2'-O-methylcytidine with phosphorothioate linkage
  modified_base 20: mod_base = OTHER; note = 2'-O-methylcytidine with phosphorothioate linkage
  modified_base 21: mod_base = OTHER; note = 2'-O-methyladenosine
accccgcgggttggtatccca

SEQ ID NO: 3029 - RNA, 21 nt, synthetic construct
  source 1..21: mol_type = other RNA
  modified_base 1: mod_base = OTHER; note = 2'-O-methylguanosine with phosphorothioate linkage
  modified_base 2: mod_base = OTHER; note = 2'-O-methyluridine with phosphorothioate linkage
  modified_base 3: mod_base = OTHER; note = 2'-O-methyladenosine
  modified_base 4: mod_base = OTHER; note = 2'-O-methyluridine
  modified_base 5: mod_base = OTHER; note = 2'-O-methylcytidine
  modified_base 6: mod_base = OTHER; note = 2'-O-methylcytidine
  modified_base 7: mod_base = OTHER; note = 2'-fluorocytidine
  modified_base 8: mod_base = OTHER; note = 2'-O-methyluridine
  modified_base 9: mod_base = OTHER; note = 2'-fluorouridine
  modified_base 10: mod_base = OTHER; note = 2'-fluorocytidine
  modified_base 11: mod_base = OTHER; note = 2'-fluoroadenosine
  modified_base 12: mod_base = OTHER; note = 2'-O-methylguanosine
  modified_base 13: mod_base = OTHER; note = 2'-O-methylguanosine
  modified_base 14: mod_base = OTHER; note = 2'-O-methyladenosine
  modified_base 15: mod_base = OTHER; note = 2'-O-methylcytidine
  modified_base 16: mod_base = OTHER; note = 2'-O-methyluridine
  modified_base 17: mod_base = OTHER; note = 2'-O-methyladenosine
  modified_base 18: mod_base = OTHER; note = 2'-O-methylguanosine
  modified_base 19: mod_base = OTHER; note = 2'-O-methylguanosine with phosphorothioate linkage
  modified_base 20: mod_base = OTHER; note = 2'-O-methyluridine with phosphorothioate linkage
  modified_base 21: mod_base = OTHER; note = 2'-O-methyladenosine
gtatcccttcaggactaggta

SEQ ID NO: 3030 - RNA, 21 nt, synthetic construct
  source 1..21: mol_type = other RNA
  modified_base 1: mod_base = OTHER; note = 2'-O-methylcytidine with phosphorothioate linkage
  modified_base 2: mod_base = OTHER; note = 2'-O-methyladenosine with phosphorothioate linkage
  modified_base 3: mod_base = OTHER; note = 2'-O-methylguanosine
  modified_base 4: mod_base = OTHER; note = 2'-O-methyladenosine
  modified_base 5: mod_base = OTHER; note = 2'-O-methylcytidine
  modified_base 6: mod_base = OTHER; note = 2'-O-methyladenosine
  modified_base 7: mod_base = OTHER; note = 2'-fluoroadenosine
  modified_base 8: mod_base = OTHER; note = 2'-O-methyluridine
  modified_base 9: mod_base = OTHER; note = 2'-fluoroadenosine
  modified_base 10: mod_base = OTHER; note = 2'-fluoroadenosine
  modified_base 11: mod_base = OTHER; note = 2'-fluorocytidine
  modified_base 12: mod_base = OTHER; note = 2'-O-methylcytidine
  modified_base 13: mod_base = OTHER; note = 2'-O-methylcytidine
  modified_base 14: mod_base = OTHER; note = 2'-O-methylcytidine
  modified_base 15: mod_base = OTHER; note = 2'-O-methyluridine
  modified_base 16: mod_base = OTHER; note = 2'-O-methyluridine
  modified_base 17: mod_base = OTHER; note = 2'-O-methyluridine
  modified_base 18: mod_base = OTHER; note = 2'-O-methyladenosine
  modified_base 19: mod_base = OTHER; note = 2'-O-methyladenosine with phosphorothioate linkage
  modified_base 20: mod_base = OTHER; note = 2'-O-methylcytidine with phosphorothioate linkage
  modified_base 21: mod_base = OTHER; note = 2'-O-methyladenosine
cagacaataacccctttaaca

SEQ ID NO: 3031 - RNA, 21 nt, synthetic construct
  source 1..21: mol_type = other RNA
  modified_base 1: mod_base = OTHER; note = 2'-O-methyladenosine with phosphorothioate linkage
  modified_base 2: mod_base = OTHER; note = 2'-O-methylguanosine with phosphorothioate linkage
  modified_base 3: mod_base = OTHER; note = 2'-O-methyladenosine
  modified_base 4: mod_base = OTHER; note = 2'-O-methylcytidine
  modified_base 5: mod_base = OTHER; note = 2'-O-methyladenosine
  modified_base 6: mod_base = OTHER; note = 2'-O-methyladenosine
  modified_base 7: mod_base = OTHER; note = 2'-fluorouridine
  modified_base 8: mod_base = OTHER; note = 2'-O-methyladenosine
  modified_base 9: mod_base = OTHER; note = 2'-fluoroadenosine
  modified_base 10: mod_base = OTHER; note = 2'-fluorocytidine
  modified_base 11: mod_base = OTHER; note = 2'-fluorocytidine
  modified_base 12: mod_base = OTHER; note = 2'-O-methylcytidine
  modified_base 13: mod_base = OTHER; note = 2'-O-methylcytidine
  modified_base 14: mod_base = OTHER; note = 2'-O-methyluridine
  modified_base 15: mod_base = OTHER; note = 2'-O-methyluridine
  modified_base 16: mod_base = OTHER; note = 2'-O-methyluridine
  modified_base 17: mod_base = OTHER; note = 2'-O-methyladenosine
  modified_base 18: mod_base = OTHER; note = 2'-O-methyladenosine
  modified_base 19: mod_base = OTHER; note = 2'-O-methylcytidine with phosphorothioate linkage
  modified_base 20: mod_base = OTHER; note = 2'-O-methylcytidine with phosphorothioate linkage
  modified_base 21: mod_base = OTHER; note = 2'-O-methyladenosine
agacaataacccctttaacca

SEQ ID NO: 3032 - RNA, 21 nt, synthetic construct
  source 1..21: mol_type = other RNA
  modified_base 1: mod_base = OTHER; note = 2'-O-methyladenosine with phosphorothioate linkage
  modified_base 2: mod_base = OTHER; note = 2'-O-methyladenosine with phosphorothioate linkage
  modified_base 3: mod_base = OTHER; note = 2'-O-methyluridine
  modified_base 4: mod_base = OTHER; note = 2'-O-methyladenosine
  modified_base 5: mod_base = OTHER; note = 2'-O-methylcytidine
  modified_base 6: mod_base = OTHER; note = 2'-O-methylcytidine
  modified_base 7: mod_base = OTHER; note = 2'-fluoroadenosine
  modified_base 8: mod_base = OTHER; note = 2'-O-methylguanosine
  modified_base 9: mod_base = OTHER; note = 2'-fluoroguanosine
  modified_base 10: mod_base = OTHER; note = 2'-fluoroadenosine
  modified_base 11: mod_base = OTHER; note = 2'-fluorouridine
  modified_base 12: mod_base = OTHER; note = 2'-O-methylcytidine
  modified_base 13: mod_base = OTHER; note = 2'-O-methyladenosine
  modified_base 14: mod_base = OTHER; note = 2'-O-methylguanosine
  modified_base 15: mod_base = OTHER; note = 2'-O-methyluridine
  modified_base 16: mod_base = OTHER; note = 2'-O-methyladenosine
  modified_base 17: mod_base = OTHER; note = 2'-O-methyluridine
  modified_base 18: mod_base = OTHER; note = 2'-O-methylcytidine
  modified_base 19: mod_base = OTHER; note = 2'-O-methylguanosine with phosphorothioate linkage
  modified_base 20: mod_base = OTHER; note = 2'-O-methyladenosine with phosphorothioate linkage
  modified_base 21: mod_base = OTHER; note = 2'-O-methyladenosine
aataccaggatcagtatcgaa

SEQ ID NO: 3033 - RNA, 21 nt, synthetic construct
  source 1..21: mol_type = other RNA
  modified_base 1: mod_base = OTHER; note = 2'-O-methylcytidine with phosphorothioate linkage
  modified_base 2: mod_base = OTHER; note = 2'-O-methylcytidine with phosphorothioate linkage
  modified_base 3: mod_base = OTHER; note = 2'-O-methyluridine
  modified_base 4: mod_base = OTHER; note = 2'-O-methylguanosine
  modified_base 5: mod_base = OTHER; note = 2'-O-methyluridine
  modified_base 6: mod_base = OTHER; note = 2'-O-methyluridine
  modified_base 7: mod_base = OTHER; note = 2'-fluorouridine
  modified_base 8: mod_base = OTHER; note = 2'-O-methyladenosine
  modified_base 9: mod_base = OTHER; note = 2'-fluoroguanosine
  modified_base 10: mod_base = OTHER; note = 2'-fluorouridine
  modified_base 11: mod_base = OTHER; note = 2'-fluorocytidine
  modified_base 12: mod_base = OTHER; note = 2'-O-methylcytidine
  modified_base 13: mod_base = OTHER; note = 2'-O-methyladenosine
  modified_base 14: mod_base = OTHER; note = 2'-O-methylcytidine
  modified_base 15: mod_base = OTHER; note = 2'-O-methylcytidine
  modified_base 16: mod_base = OTHER; note = 2'-O-methyladenosine
  modified_base 17: mod_base = OTHER; note = 2'-O-methylcytidine
  modified_base 18: mod_base = OTHER; note = 2'-O-methylcytidine
  modified_base 19: mod_base = OTHER; note = 2'-O-methylguanosine with phosphorothioate linkage
  modified_base 20: mod_base = OTHER; note = 2'-O-methyladenosine with phosphorothioate linkage
  modified_base 21: mod_base = OTHER; note = 2'-O-methyladenosine
cctgtttagtccaccaccgaa

SEQ ID NO: 3034 - RNA, 21 nt, synthetic construct
  source 1..21: mol_type = other RNA
  modified_base 1: mod_base = OTHER; note = 2'-O-methylcytidine with phosphorothioate linkage
  modified_base 2: mod_base = OTHER; note = 2'-O-methyladenosine with phosphorothioate linkage
  modified_base 3: mod_base = OTHER; note = 2'-O-methyladenosine
  modified_base 4: mod_base = OTHER; note = 2'-O-methylguanosine
  modified_base 5: mod_base = OTHER; note = 2'-O-methyluridine
  modified_base 6: mod_base = OTHER; note = 2'-O-methylcytidine
  modified_base 7: mod_base = OTHER; note = 2'-fluorocytidine
  modified_base 8: mod_base = OTHER; note = 2'-O-methyladenosine
  modified_base 9: mod_base = OTHER; note = 2'-fluoroadenosine
  modified_base 10: mod_base = OTHER; note = 2'-fluoroguanosine
  modified_base 11: mod_base = OTHER; note = 2'-fluorouridine
  modified_base 12: mod_base = OTHER; note = 2'-O-methylcytidine
  modified_base 13: mod_base = OTHER; note = 2'-O-methyladenosine
  modified_base 14: mod_base = OTHER; note = 2'-O-methyluridine
  modified_base 15: mod_base = OTHER; note = 2'-O-methylguanosine
  modified_base 16: mod_base = OTHER; note = 2'-O-methylcytidine
  modified_base 17: mod_base = OTHER; note = 2'-O-methylguanosine
  modified_base 18: mod_base = OTHER; note = 2'-O-methyladenosine
  modified_base 19: mod_base = OTHER; note = 2'-O-methylguanosine with phosphorothioate linkage
  modified_base 20: mod_base = OTHER; note = 2'-O-methyluridine with phosphorothioate linkage
  modified_base 21: mod_base = OTHER; note = 2'-O-methyladenosine
caagtccaagtcatgcgagta

SEQ ID NO: 3035 - RNA, 21 nt, synthetic construct
  source 1..21: mol_type = other RNA
  modified_base 1: mod_base = OTHER; note = 2'-O-methyladenosine with phosphorothioate linkage
  modified_base 2: mod_base = OTHER; note = 2'-O-methyladenosine with phosphorothioate linkage
  modified_base 3: mod_base = OTHER; note = 2'-O-methylguanosine
  modified_base 4: mod_base = OTHER; note = 2'-O-methyluridine
  modified_base 5: mod_base = OTHER; note = 2'-O-methylcytidine
  modified_base 6: mod_base = OTHER; note = 2'-O-methylcytidine
  modified_base 7: mod_base = OTHER; note = 2'-fluoroadenosine
  modified_base 8: mod_base = OTHER; note = 2'-O-methyladenosine
  modified_base 9: mod_base = OTHER; note = 2'-fluoroguanosine
  modified_base 10: mod_base = OTHER; note = 2'-fluorouridine
  modified_base 11: mod_base = OTHER; note = 2'-fluorocytidine
  modified_base 12: mod_base = OTHER; note = 2'-O-methyladenosine
  modified_base 13: mod_base = OTHER; note = 2'-O-methyluridine
  modified_base 14: mod_base = OTHER; note = 2'-O-methylguanosine
  modified_base 15: mod_base = OTHER; note = 2'-O-methylcytidine
  modified_base 16: mod_base = OTHER; note = 2'-O-methylguanosine
  modified_base 17: mod_base = OTHER; note = 2'-O-methyladenosine
  modified_base 18: mod_base = OTHER; note = 2'-O-methylguanosine
  modified_base 19: mod_base = OTHER; note = 2'-O-methyluridine with phosphorothioate linkage
  modified_base 20: mod_base = OTHER; note = 2'-O-methyluridine with phosphorothioate linkage
  modified_base 21: mod_base = OTHER; note = 2'-O-methyladenosine
aagtccaagtcatgcgagtta

SEQ ID NO: 3036 - RNA, 21 nt, synthetic construct
  source 1..21: mol_type = other RNA
  modified_base 1: mod_base = OTHER; note = 2'-O-methylguanosine with phosphorothioate linkage
  modified_base 2: mod_base = OTHER; note = 2'-O-methyluridine with phosphorothioate linkage
  modified_base 3: mod_base = OTHER; note = 2'-O-methylguanosine
  modified_base 4: mod_base = OTHER; note = 2'-O-methylcytidine
  modified_base 5: mod_base = OTHER; note = 2'-O-methylguanosine
  modified_base 6: mod_base = OTHER; note = 2'-O-methyladenosine
  modified_base 7: mod_base = OTHER; note = 2'-fluorocytidine
  modified_base 8: mod_base = OTHER; note = 2'-O-methylcytidine
  modified_base 9: mod_base = OTHER; note = 2'-fluoroadenosine
  modified_base 10: mod_base = OTHER; note = 2'-fluorocytidine
  modified_base 11: mod_base = OTHER; note = 2'-fluoroguanosine
  modified_base 12: mod_base = OTHER; note = 2'-O-methylcytidine
  modified_base 13: mod_base = OTHER; note = 2'-O-methylguanosine
  modified_base 14: mod_base = OTHER; note = 2'-O-methyluridine
  modified_base 15: mod_base = OTHER; note = 2'-O-methylguanosine
  modified_base 16: mod_base = OTHER; note = 2'-O-methylcytidine
  modified_base 17: mod_base = OTHER; note = 2'-O-methyladenosine
  modified_base 18: mod_base = OTHER; note = 2'-O-methylcytidine
  modified_base 19: mod_base = OTHER; note = 2'-O-methylcytidine with phosphorothioate linkage
  modified_base 20: mod_base = OTHER; note = 2'-O-methylcytidine with phosphorothioate linkage
  modified_base 21: mod_base = OTHER; note = 2'-O-methyladenosine
gtgcgaccacgcgtgcaccca

SEQ ID NO: 3037 - RNA, 21 nt, synthetic construct
  source 1..21: mol_type = other RNA
  modified_base 1: mod_base = OTHER; note = 2'-O-methylcytidine with phosphorothioate linkage
  modified_base 2: mod_base = OTHER; note = 2'-O-methylcytidine with phosphorothioate linkage
  modified_base 3: mod_base = OTHER; note = 2'-O-methyladenosine
  modified_base 4: mod_base = OTHER; note = 2'-O-methyluridine
  modified_base 5: mod_base = OTHER; note = 2'-O-methylguanosine
  modified_base 6: mod_base = OTHER; note = 2'-O-methyladenosine
  modified_base 7: mod_base = OTHER; note = 2'-fluorocytidine
  modified_base 8: mod_base = OTHER; note = 2'-O-methylguanosine
  modified_base 9: mod_base = OTHER; note = 2'-fluoroguanosine
  modified_base 10: mod_base = OTHER; note = 2'-fluorouridine
  modified_base 11: mod_base = OTHER; note = 2'-fluorocytidine
  modified_base 12: mod_base = OTHER; note = 2'-O-methyladenosine
  modified_base 13: mod_base = OTHER; note = 2'-O-methyladenosine
  modified_base 14: mod_base = OTHER; note = 2'-O-methylguanosine
  modified_base 15: mod_base = OTHER; note = 2'-O-methyluridine
  modified_base 16: mod_base = OTHER; note = 2'-O-methylcytidine
  modified_base 17: mod_base = OTHER; note = 2'-O-methylcytidine
  modified_base 18: mod_base = OTHER; note = 2'-O-methylguanosine
  modified_base 19: mod_base = OTHER; note = 2'-O-methyladenosine with phosphorothioate linkage
  modified_base 20: mod_base = OTHER; note = 2'-O-methylcytidine with phosphorothioate linkage
  modified_base 21: mod_base = OTHER; note = 2'-O-methyladenosine
ccatgacggtcaagtccgaca

SEQ ID NO: 3038 - RNA, 21 nt, synthetic construct
  source 1..21: mol_type = other RNA
  modified_base 1: mod_base = OTHER; note = 2'-O-methyladenosine with phosphorothioate linkage
  modified_base 2: mod_base = OTHER; note = 2'-O-methyluridine with phosphorothioate linkage
  modified_base 3: mod_base = OTHER; note = 2'-O-methylguanosine
  modified_base 4: mod_base = OTHER; note = 2'-O-methyladenosine
  modified_base 5: mod_base = OTHER; note = 2'-O-methylcytidine
  modified_base 6: mod_base = OTHER; note = 2'-O-methylguanosine
  modified_base 7: mod_base = OTHER; note = 2'-fluoroguanosine
  modified_base 8: mod_base = OTHER; note = 2'-O-methyluridine
  modified_base 9: mod_base = OTHER; note = 2'-fluorocytidine
  modified_base 10: mod_base = OTHER; note = 2'-fluoroadenosine
  modified_base 11: mod_base = OTHER; note = 2'-fluoroadenosine
  modified_base 12: mod_base = OTHER; note = 2'-O-methylguanosine
  modified_base 13: mod_base = OTHER; note = 2'-O-methyluridine
  modified_base 14: mod_base = OTHER; note = 2'-O-methylcytidine
  modified_base 15: mod_base = OTHER; note = 2'-O-methylcytidine
  modified_base 16: mod_base = OTHER; note = 2'-O-methylguanosine
  modified_base 17: mod_base = OTHER; note = 2'-O-methyladenosine
  modified_base 18: mod_base = OTHER; note = 2'-O-methylcytidine
  modified_base 19: mod_base = OTHER; note = 2'-O-methylguanosine with phosphorothioate linkage
  modified_base 20: mod_base = OTHER; note = 2'-O-methyladenosine with phosphorothioate linkage
  modified_base 21: mod_base = OTHER; note = 2'-O-methyladenosine
atgacggtcaagtccgacgaa

SEQ ID NO: 3039 - RNA, 21 nt, synthetic construct
  source 1..21: mol_type = other RNA
  modified_base 1: mod_base = OTHER; note = 2'-O-methyluridine with phosphorothioate linkage
  modified_base 2: mod_base = OTHER; note = 2'-O-methylguanosine with phosphorothioate linkage
  modified_base 3: mod_base = OTHER; note = 2'-O-methyladenosine
  modified_base 4: mod_base = OTHER; note = 2'-O-methylcytidine
  modified_base 5: mod_base = OTHER; note = 2'-O-methylguanosine
  modified_base 6: mod_base = OTHER; note = 2'-O-methylguanosine
  modified_base 7: mod_base = OTHER; note = 2'-fluorouridine
  modified_base 8: mod_base = OTHER; note = 2'-O-methylcytidine
  modified_base 9: mod_base = OTHER; note = 2'-fluoroadenosine
  modified_base 10: mod_base = OTHER; note = 2'-fluoroadenosine
  modified_base 11: mod_base = OTHER; note = 2'-fluoroguanosine
  modified_base 12: mod_base = OTHER; note = 2'-O-methyluridine
  modified_base 13: mod_base = OTHER; note = 2'-O-methylcytidine
  modified_base 14: mod_base = OTHER; note = 2'-O-methylcytidine
  modified_base 15: mod_base = OTHER; note = 2'-O-methylguanosine
  modified_base 16: mod_base = OTHER; note = 2'-O-methyladenosine
  modified_base 17: mod_base = OTHER; note = 2'-O-methylcytidine
  modified_base 18: mod_base = OTHER; note = 2'-O-methylguanosine
  modified_base 19: mod_base = OTHER; note = 2'-O-methyladenosine with phosphorothioate linkage
  modified_base 20: mod_base = OTHER; note = 2'-O-methylcytidine with phosphorothioate linkage
  modified_base 21: mod_base = OTHER; note = 2'-O-methyladenosine
tgacggtcaagtccgacgaca

SEQ ID NO: 3040 - RNA, 21 nt, synthetic construct
  source 1..21: mol_type = other RNA
  modified_base 1: mod_base = OTHER; note = 2'-O-methylguanosine with phosphorothioate linkage
  modified_base 2: mod_base = OTHER; note = 2'-O-methyladenosine with phosphorothioate linkage
  modified_base 3: mod_base = OTHER; note = 2'-O-methylcytidine
  modified_base 4: mod_base = OTHER; note = 2'-O-methylguanosine
  modified_base 5: mod_base = OTHER; note = 2'-O-methylguanosine
  modified_base 6: mod_base = OTHER; note = 2'-O-methyluridine
  modified_base 7: mod_base = OTHER; note = 2'-fluorocytidine
  modified_base 8: mod_base = OTHER; note = 2'-O-methyladenosine
  modified_base 9: mod_base = OTHER; note = 2'-fluoroadenosine
  modified_base 10: mod_base = OTHER; note = 2'-fluoroguanosine
  modified_base 11: mod_base = OTHER; note = 2'-fluorouridine
  modified_base 12: mod_base = OTHER; note = 2'-O-methylcytidine
  modified_base 13: mod_base = OTHER; note = 2'-O-methylcytidine
  modified_base 14: mod_base = OTHER; note = 2'-O-methylguanosine
  modified_base 15: mod_base = OTHER; note = 2'-O-methyladenosine
  modified_base 16: mod_base = OTHER; note = 2'-O-methylcytidine
  modified_base 17: mod_base = OTHER; note = 2'-O-methylguanosine
  modified_base 18: mod_base = OTHER; note = 2'-O-methyladenosine
  modified_base 19: mod_base = OTHER; note = 2'-O-methylcytidine with phosphorothioate linkage
  modified_base 20: mod_base = OTHER; note = 2'-O-methylguanosine with phosphorothioate linkage
  modified_base 21: mod_base = OTHER; note = 2'-O-methyladenosine
gacggtcaagtccgacgacga

SEQ ID NO: 3041 - RNA, 21 nt, synthetic construct
  source 1..21: mol_type = other RNA
  modified_base 1: mod_base = OTHER; note = 2'-O-methyladenosine with phosphorothioate linkage
  modified_base 2: mod_base = OTHER; note = 2'-O-methylcytidine with phosphorothioate linkage
  modified_base 3: mod_base = OTHER; note = 2'-O-methylguanosine
  modified_base 4: mod_base = OTHER; note = 2'-O-methylguanosine
  modified_base 5: mod_base = OTHER; note = 2'-O-methyluridine
  modified_base 6: mod_base = OTHER; note = 2'-O-methylcytidine
  modified_base 7: mod_base = OTHER; note = 2'-fluoroadenosine
  modified_base 8: mod_base = OTHER; note = 2'-O-methyladenosine
  modified_base 9: mod_base = OTHER; note = 2'-fluoroguanosine
  modified_base 10: mod_base = OTHER; note = 2'-fluorouridine
  modified_base 11: mod_base = OTHER; note = 2'-fluorocytidine
  modified_base 12: mod_base = OTHER; note = 2'-O-methylcytidine
  modified_base 13: mod_base = OTHER; note = 2'-O-methylguanosine
  modified_base 14: mod_base = OTHER; note = 2'-O-methyladenosine
  modified_base 15: mod_base = OTHER; note = 2'-O-methylcytidine
  modified_base 16: mod_base = OTHER; note = 2'-O-methylguanosine
  modified_base 17: mod_base = OTHER; note = 2'-O-methyladenosine
  modified_base 18: mod_base = OTHER; note = 2'-O-methylcytidine
  modified_base 19: mod_base = OTHER; note = 2'-O-methylguanosine with phosphorothioate linkage
  modified_base 20: mod_base = OTHER; note = 2'-O-methylguanosine with phosphorothioate linkage
  modified_base 21: mod_base = OTHER; note = 2'-O-methyladenosine
acggtcaagtccgacgacgga

SEQ ID NO: 3042 - RNA, 21 nt, synthetic construct
  source 1..21: mol_type = other RNA
  modified_base 1: mod_base = OTHER; note = 2'-O-methylcytidine with phosphorothioate linkage
  modified_base 2: mod_base = OTHER; note = 2'-O-methylguanosine with phosphorothioate linkage
  modified_base 3: mod_base = OTHER; note = 2'-O-methylguanosine
  modified_base 4: mod_base = OTHER; note = 2'-O-methyluridine
  modified_base 5: mod_base = OTHER; note = 2'-O-methylcytidine
  modified_base 6: mod_base = OTHER; note = 2'-O-methyladenosine
  modified_base 7: mod_base = OTHER; note = 2'-fluoroadenosine
  modified_base 8: mod_base = OTHER; note = 2'-O-methylguanosine
  modified_base 9: mod_base = OTHER; note = 2'-fluorouridine
  modified_base 10: mod_base = OTHER; note = 2'-fluorocytidine
  modified_base 11: mod_base = OTHER; note = 2'-fluorocytidine
  modified_base 12: mod_base = OTHER; note = 2'-O-methylguanosine
  modified_base 13: mod_base = OTHER; note = 2'-O-methyladenosine
  modified_base 14: mod_base = OTHER; note = 2'-O-methylcytidine
  modified_base 15: mod_base = OTHER; note = 2'-O-methylguanosine
  modified_base 16: mod_base = OTHER; note = 2'-O-methyladenosine
  modified_base 17: mod_base = OTHER; note = 2'-O-methylcytidine
  modified_base 18: mod_base = OTHER; note = 2'-O-methylguanosine
  modified_base 19: mod_base = OTHER; note = 2'-O-methylguanosine with phosphorothioate linkage
  modified_base 20: mod_base = OTHER; note = 2'-O-methyluridine with phosphorothioate linkage
  modified_base 21: mod_base = OTHER; note = 2'-O-methyladenosine
cggtcaagtccgacgacggta

SEQ ID NO: 3043 - RNA, 21 nt, synthetic construct
  source 1..21: mol_type = other RNA
  modified_base 1: mod_base = OTHER; note = 2'-O-methylguanosine with phosphorothioate linkage
  modified_base 2: mod_base = OTHER; note = 2'-O-methylguanosine with phosphorothioate linkage
  modified_base 3: mod_base = OTHER; note = 2'-O-methyluridine
  modified_base 4: mod_base = OTHER; note = 2'-O-methylcytidine
  modified_base 5: mod_base = OTHER; note = 2'-O-methyladenosine
  modified_base 6: mod_base = OTHER; note = 2'-O-methyladenosine
  modified_base 7: mod_base = OTHER; note = 2'-fluoroguanosine
  modified_base 8: mod_base = OTHER; note = 2'-O-methyluridine
  modified_base 9: mod_base = OTHER; note = 2'-fluorocytidine
  modified_base 10: mod_base = OTHER; note = 2'-fluorocytidine
  modified_base 11: mod_base = OTHER; note = 2'-fluoroguanosine
  modified_base 12: mod_base = OTHER; note = 2'-O-methyladenosine
  modified_base 13: mod_base = OTHER; note = 2'-O-methylcytidine
  modified_base 14: mod_base = OTHER; note = 2'-O-methylguanosine
  modified_base 15: mod_base = OTHER; note = 2'-O-methyladenosine
  modified_base 16: mod_base = OTHER; note = 2'-O-methylcytidine
  modified_base 17: mod_base = OTHER; note = 2'-O-methylguanosine
  modified_base 18: mod_base = OTHER; note = 2'-O-methylguanosine
  modified_base 19: mod_base = OTHER; note = 2'-O-methyluridine with phosphorothioate linkage
  modified_base 20: mod_base = OTHER; note = 2'-O-methylcytidine with phosphorothioate linkage
  modified_base 21: mod_base = OTHER; note = 2'-O-methyladenosine
ggtcaagtccgacgacggtca

SEQ ID NO: 3044 - RNA, 21 nt, synthetic construct
  source 1..21: mol_type = other RNA
  modified_base 1: mod_base = OTHER; note = 2'-O-methylcytidine with phosphorothioate linkage
  modified_base 2: mod_base = OTHER; note = 2'-O-methyladenosine with phosphorothioate linkage
  modified_base 3: mod_base = OTHER; note = 2'-O-methyladenosine
  modified_base 4: mod_base = OTHER; note = 2'-O-methylguanosine
  modified_base 5: mod_base = OTHER; note = 2'-O-methyluridine
  modified_base 6: mod_base = OTHER; note = 2'-O-methylcytidine
  modified_base 7: mod_base = OTHER; note = 2'-fluorocytidine
  modified_base 8: mod_base = OTHER; note = 2'-O-methylguanosine
  modified_base 9: mod_base = OTHER; note = 2'-fluoroadenosine
  modified_base 10: mod_base = OTHER; note = 2'-fluorocytidine
  modified_base 11: mod_base = OTHER; note = 2'-fluoroguanosine
  modified_base 12: mod_base = OTHER; note = 2'-O-methyladenosine
  modified_base 13: mod_base = OTHER; note = 2'-O-methylcytidine
  modified_base 14: mod_base = OTHER; note = 2'-O-methylguanosine
  modified_base 15: mod_base = OTHER; note = 2'-O-methylguanosine
  modified_base 16: mod_base = OTHER; note = 2'-O-methyluridine
  modified_base 17: mod_base = OTHER; note = 2'-O-methylcytidine
  modified_base 18: mod_base = OTHER; note = 2'-O-methyluridine
  modified_base 19: mod_base = OTHER; note = 2'-O-methylcytidine with phosphorothioate linkage
  modified_base 20: mod_base = OTHER; note = 2'-O-methyluridine with phosphorothioate linkage
  modified_base 21: mod_base = OTHER; note = 2'-O-methyladenosine
caagtccgacgacggtctcta

SEQ ID NO: 3045 - RNA, 21 nt, synthetic construct
  source 1..21: mol_type = other RNA
  modified_base 1: mod_base = OTHER; note = 2'-O-methyladenosine with phosphorothioate linkage
  modified_base 2: mod_base = OTHER; note = 2'-O-methylguanosine with phosphorothioate linkage
  modified_base 3: mod_base = OTHER; note = 2'-O-methylcytidine
  modified_base 4: mod_base = OTHER; note = 2'-O-methyladenosine
  modified_base 5: mod_base = OTHER; note = 2'-O-methylguanosine
  modified_base 6: mod_base = OTHER; note = 2'-O-methylcytidine
  modified_base 7: mod_base = OTHER; note = 2'-fluoroguanosine
  modified_base 8: mod_base = OTHER; note = 2'-O-methylcytidine
  modified_base 9: mod_base = OTHER; note = 2'-fluoroguanosine
  modified_base 10: mod_base = OTHER; note = 2'-fluorocytidine
  modified_base 11: mod_base = OTHER; note = 2'-fluorouridine
  modified_base 12: mod_base = OTHER; note = 2'-O-methylcytidine
  modified_base 13: mod_base = OTHER; note = 2'-O-methyladenosine
  modified_base 14: mod_base = OTHER; note = 2'-O-methyladenosine
  modified_base 15: mod_base = OTHER; note = 2'-O-methylguanosine
  modified_base 16: mod_base = OTHER; note = 2'-O-methyluridine
  modified_base 17: mod_base = OTHER; note = 2'-O-methylcytidine
  modified_base 18: mod_base = OTHER; note = 2'-O-methylcytidine
  modified_base 19: mod_base = OTHER; note = 2'-O-methylguanosine with phosphorothioate linkage
  modified_base 20: mod_base = OTHER; note = 2'-O-methyluridine with phosphorothioate linkage
  modified_base 21: mod_base = OTHER; note = 2'-O-methyladenosine
agcagcgcgctcaagtccgta

SEQ ID NO: 3046 - RNA, 21 nt, synthetic construct
  source 1..21: mol_type = other RNA
  modified_base 1: mod_base = OTHER; note = 2'-O-methylguanosine with phosphorothioate linkage
  modified_base 2: mod_base = OTHER; note = 2'-O-methylcytidine with phosphorothioate linkage
  modified_base 3: mod_base = OTHER; note = 2'-O-methyladenosine
  modified_base 4: mod_base = OTHER; note = 2'-O-methylguanosine
  modified_base 5: mod_base = OTHER; note = 2'-O-methylcytidine
  modified_base 6: mod_base = OTHER; note = 2'-O-methylguanosine
  modified_base 7: mod_base = OTHER; note = 2'-fluorocytidine
  modified_base 8: mod_base = OTHER; note = 2'-O-methylguanosine
  modified_base 9: mod_base = OTHER; note = 2'-fluorocytidine
  modified_base 10: mod_base = OTHER; note = 2'-fluorouridine
  modified_base 11: mod_base = OTHER; note = 2'-fluorocytidine
  modified_base 12: mod_base = OTHER; note = 2'-O-methyladenosine
  modified_base 13: mod_base = OTHER; note = 2'-O-methyladenosine
  modified_base 14: mod_base = OTHER; note = 2'-O-methylguanosine
  modified_base 15: mod_base = OTHER; note = 2'-O-methyluridine
  modified_base 16: mod_base = OTHER; note = 2'-O-methylcytidine
  modified_base 17: mod_base = OTHER; note = 2'-O-methylcytidine
  modified_base 18: mod_base = OTHER; note = 2'-O-methylguanosine
  modified_base 19: mod_base = OTHER; note = 2'-O-methyluridine with phosphorothioate linkage
  modified_base 20: mod_base = OTHER; note = 2'-O-methylguanosine with phosphorothioate linkage
  modified_base 21: mod_base = OTHER; note = 2'-O-methyladenosine
gcagcgcgctcaagtccgtga

SEQ ID NO: 3047 - RNA, 21 nt, synthetic construct
  source 1..21: mol_type = other RNA
  modified_base 1: mod_base = OTHER; note = 2'-O-methylguanosine with phosphorothioate linkage
  modified_base 2: mod_base = OTHER; note = 2'-O-methyladenosine with phosphorothioate linkage
  modified_base 3: mod_base = OTHER; note = 2'-O-methylguanosine
  modified_base 4: mod_base = OTHER; note = 2'-O-methyladenosine
  modified_base 5: mod_base = OTHER; note = 2'-O-methyladenosine
  modified_base 6: mod_base = OTHER; note = 2'-O-methylcytidine
  modified_base 7: mod_base = OTHER; note = 2'-fluoroguanosine
  modified_base 8: mod_base = OTHER; note = 2'-O-methyladenosine
  modified_base 9: mod_base = OTHER; note = 2'-fluorocytidine
  modified_base 10: mod_base = OTHER; note = 2'-fluorocytidine
  modified_base 11: mod_base = OTHER; note = 2'-fluorocytidine
  modified_base 12: mod_base = OTHER; note = 2'-O-methylcytidine
  modified_base 13: mod_base = OTHER; note = 2'-O-methyladenosine
  modified_base 14: mod_base = OTHER; note = 2'-O-methyladenosine
  modified_base 15: mod_base = OTHER; note = 2'-O-methylcytidine
  modified_base 16: mod_base = OTHER; note = 2'-O-methylcytidine
  modified_base 17: mod_base = OTHER; note = 2'-O-methyluridine
  modified_base 18: mod_base = OTHER; note = 2'-O-methylguanosine
  modified_base 19: mod_base = OTHER; note = 2'-O-methyladenosine with phosphorothioate linkage
  modified_base 20: mod_base = OTHER; note = 2'-O-methyluridine with phosphorothioate linkage
  modified_base 21: mod_base = OTHER; note = 2'-O-methyladenosine
gagaacgaccccaacctgata

SEQ ID NO: 3048 - RNA, 21 nt, synthetic construct
  source 1..21: mol_type = other RNA
  modified_base 1: mod_base = OTHER; note = 2'-O-methylcytidine with phosphorothioate linkage
  modified_base 2: mod_base = OTHER; note = 2'-O-methyluridine with phosphorothioate linkage
  modified_base 3: mod_base = OTHER; note = 2'-O-methylguanosine
  modified_base 4: mod_base = OTHER; note = 2'-O-methyladenosine
  modified_base 5: mod_base = OTHER; note = 2'-O-methylcytidine
  modified_base 6: mod_base = OTHER; note = 2'-O-methylguanosine
  modified_base 7: mod_base = OTHER; note = 2'-fluoroguanosine
  modified_base 8: mod_base = OTHER; note = 2'-O-methyladenosine
  modified_base 9: mod_base = OTHER; note = 2'-fluoroguanosine
  modified_base 10: mod_base = OTHER; note = 2'-fluoroadenosine
  modified_base 11: mod_base = OTHER; note = 2'-fluoroguanosine
  modified_base 12: mod_base = OTHER; note = 2'-O-methylcytidine
  modified_base 13: mod_base = OTHER; note = 2'-O-methylguanosine
  modified_base 14: mod_base = OTHER; note = 2'-O-methyladenosine
  modified_base 15: mod_base = OTHER; note = 2'-O-methylguanosine
  modified_base 16: mod_base = OTHER; note = 2'-O-methyladenosine
  modified_base 17: mod_base = OTHER; note = 2'-O-methylguanosine
  modified_base 18: mod_base = OTHER; note = 2'-O-methylguanosine
  modified_base 19: mod_base = OTHER; note = 2'-O-methylguanosine with phosphorothioate linkage
  modified_base 20: mod_base = OTHER; note = 2'-O-methyluridine with phosphorothioate linkage
  modified_base 21: mod_base = OTHER; note = 2'-O-methyladenosine
ctgacggagagcgagagggta

SEQ ID NO: 3049 - RNA, 21 nt, synthetic construct
  source 1..21: mol_type = other RNA
  modified_base 1: mod_base = OTHER; note = 2'-O-methyladenosine with phosphorothioate linkage
  modified_base 2: mod_base = OTHER; note = 2'-O-methylguanosine with phosphorothioate linkage
  modified_base 3: mod_base = OTHER; note = 2'-O-methyladenosine
  modified_base 4: mod_base = OTHER; note = 2'-O-methylguanosine
  modified_base 5: mod_base = OTHER; note = 2'-O-methylcytidine
  modified_base 6: mod_base = OTHER; note = 2'-O-methylguanosine
  modified_base 7: mod_base = OTHER; note = 2'-fluoroadenosine
  modified_base 8: mod_base = OTHER; note = 2'-O-methylguanosine
  modified_base 9: mod_base = OTHER; note = 2'-fluoroadenosine
  modified_base 10: mod_base = OTHER; note = 2'-fluoroguanosine
  modified_base 11: mod_base = OTHER; note = 2'-fluoroguanosine
  modified_base 12: mod_base = OTHER; note = 2'-O-methylguanosine
  modified_base 13: mod_base = OTHER; note = 2'-O-methyluridine
  modified_base 14: mod_base = OTHER; note = 2'-O-methylguanosine
  modified_base 15: mod_base = OTHER; note = 2'-O-methylguanosine
  modified_base 16: mod_base = OTHER; note = 2'-O-methyladenosine
  modified_base 17: mod_base = OTHER; note = 2'-O-methylcytidine
  modified_base 18: mod_base = OTHER; note = 2'-O-methyluridine
  modified_base 19: mod_base = OTHER; note = 2'-O-methyladenosine with phosphorothioate linkage
  modified_base 20: mod_base = OTHER; note = 2'-O-methylcytidine with phosphorothioate linkage
  modified_base 21: mod_base = OTHER; note = 2'-O-methyladenosine
agagcgagagggtggactaca

SEQ ID NO: 3050 - RNA, 21 nt, synthetic construct
  source 1..21: mol_type = other RNA
  modified_base 1: mod_base = OTHER; note = 2'-O-methylguanosine with phosphorothioate linkage
  modified_base 2: mod_base = OTHER; note = 2'-O-methylcytidine with phosphorothioate linkage
  modified_base 3: mod_base = OTHER; note = 2'-O-methylguanosine
  modified_base 4: mod_base = OTHER; note = 2'-O-methyladenosine
  modified_base 5: mod_base = OTHER; note = 2'-O-methylguanosine
  modified_base 6: mod_base = OTHER; note = 2'-O-methyladenosine
  modified_base 7: mod_base = OTHER; note = 2'-fluoroguanosine
  modified_base 8: mod_base = OTHER; note = 2'-O-methylguanosine
  modified_base 9: mod_base = OTHER; note = 2'-fluoroguanosine
  modified_base 10: mod_base = OTHER; note = 2'-fluorouridine
  modified_base 11: mod_base = OTHER; note = 2'-fluoroguanosine
  modified_base 12: mod_base = OTHER; note = 2'-O-methylguanosine
  modified_base 13: mod_base = OTHER; note = 2'-O-methyladenosine
  modified_base 14: mod_base = OTHER; note = 2'-O-methylcytidine
  modified_base 15: mod_base = OTHER; note = 2'-O-methyluridine
  modified_base 16: mod_base = OTHER; note = 2'-O-methyladenosine
  modified_base 17: mod_base = OTHER; note = 2'-O-methylcytidine
  modified_base 18: mod_base = OTHER; note = 2'-O-methylguanosine
  modified_base 19: mod_base = OTHER; note = 2'-O-methylguanosine with phosphorothioate linkage
  modified_base 20: mod_base = OTHER; note = 2'-O-methylcytidine with phosphorothioate linkage
  modified_base 21: mod_base = OTHER; note = 2'-O-methyladenosine
gcgagagggtggactacggca

SEQ ID NO: 3051 - RNA, 21 nt, synthetic construct
  source 1..21: mol_type = other RNA
  modified_base 1: mod_base = OTHER; note = 2'-O-methylcytidine with phosphorothioate linkage
  modified_base 2: mod_base = OTHER; note = 2'-O-methylguanosine with phosphorothioate linkage
  modified_base 3: mod_base = OTHER; note = 2'-O-methyladenosine
  modified_base 4: mod_base = OTHER; note = 2'-O-methylguanosine
  modified_base 5: mod_base = OTHER; note = 2'-O-methyladenosine
  modified_base 6: mod_base = OTHER; note = 2'-O-methylguanosine
  modified_base 7: mod_base = OTHER; note = 2'-fluoroguanosine
  modified_base 8: mod_base = OTHER; note = 2'-O-methylguanosine
  modified_base 9: mod_base = OTHER; note = 2'-fluorouridine
  modified_base 10: mod_base = OTHER; note = 2'-fluoroguanosine
  modified_base 11: mod_base = OTHER; note = 2'-fluoroguanosine
  modified_base 12: mod_base = OTHER; note = 2'-O-methyladenosine
  modified_base 13: mod_base = OTHER; note = 2'-O-methylcytidine
  modified_base 14: mod_base = OTHER; note = 2'-O-methyluridine
  modified_base 15: mod_base = OTHER; note = 2'-O-methyladenosine
  modified_base 16: mod_base = OTHER; note = 2'-O-methylcytidine
  modified_base 17: mod_base = OTHER; note = 2'-O-methylguanosine
  modified_base 18: mod_base = OTHER; note = 2'-O-methylguanosine
  modified_base 19: mod_base = OTHER; note = 2'-O-methylcytidine with phosphorothioate linkage
  modified_base 20: mod_base = OTHER; note = 2'-O-methyluridine with phosphorothioate linkage
  modified_base 21: mod_base = OTHER; note = 2'-O-methyladenosine
cgagagggtggactacggcta

SEQ ID NO: 3052 - RNA, 21 nt, synthetic construct
  source 1..21: mol_type = other RNA
  modified_base 1: mod_base = OTHER; note = 2'-O-methylguanosine with phosphorothioate linkage
  modified_base 2: mod_base = OTHER; note = 2'-O-methyladenosine with phosphorothioate linkage
  modified_base 3: mod_base = OTHER; note = 2'-O-methylguanosine
  modified_base 4: mod_base = OTHER; note = 2'-O-methylguanosine
  modified_base 5: mod_base = OTHER; note = 2'-O-methylguanosine
  modified_base 6: mod_base = OTHER; note = 2'-O-methyluridine
  modified_base 7: mod_base = OTHER; note = 2'-fluoroguanosine
  modified_base 8: mod_base = OTHER; note = 2'-O-methylguanosine
  modified_base 9: mod_base = OTHER; note = 2'-fluoroadenosine
  modified_base 10: mod_base = OTHER; note = 2'-fluorocytidine
  modified_base 11: mod_base = OTHER; note = 2'-fluorouridine
  modified_base 12: mod_base = OTHER; note = 2'-O-methyladenosine
  modified_base 13: mod_base = OTHER; note = 2'-O-methylcytidine
  modified_base 14: mod_base = OTHER; note = 2'-O-methylguanosine
  modified_base 15: mod_base = OTHER; note = 2'-O-methylguanosine
  modified_base 16: mod_base = OTHER; note = 2'-O-methylcytidine
  modified_base 17: mod_base = OTHER; note = 2'-O-methyluridine
  modified_base 18: mod_base = OTHER; note = 2'-O-methyluridine
  modified_base 19: mod_base = OTHER; note = 2'-O-methylcytidine with phosphorothioate linkage
  modified_base 20: mod_base = OTHER; note = 2'-O-methylguanosine with phosphorothioate linkage
  modified_base 21: mod_base = OTHER; note = 2'-O-methyladenosine
gagggtggactacggcttcga

SEQ ID NO: 3053 - RNA, 21 nt, synthetic construct
  source 1..21: mol_type = other RNA
  modified_base 1: mod_base = OTHER; note = 2'-O-methylcytidine with phosphorothioate linkage
  modified_base 2: mod_base = OTHER; note = 2'-O-methyladenosine with phosphorothioate linkage
  modified_base 3: mod_base = OTHER; note = 2'-O-methylcytidine
  modified_base 4: mod_base = OTHER; note = 2'-O-methylguanosine
  modified_base 5: mod_base = OTHER; note = 2'-O-methyladenosine
  modified_base 6: mod_base = OTHER; note = 2'-O-methylguanosine
  modified_base 7: mod_base = OTHER; note = 2'-fluoroadenosine
  modified_base 8: mod_base = OTHER; note = 2'-O-methyladenosine
  modified_base 9: mod_base = OTHER; note = 2'-fluorocytidine
  modified_base 10: mod_base = OTHER; note = 2'-fluoroadenosine
  modified_base 11: mod_base = OTHER; note = 2'-fluoroguanosine
  modified_base 12: mod_base = OTHER; note = 2'-O-methylcytidine
  modified_base 13: mod_base = OTHER; note = 2'-O-methyluridine
  modified_base 14: mod_base = OTHER; note = 2'-O-methylcytidine
  modified_base 15: mod_base = OTHER; note = 2'-O-methylguanosine
  modified_base 16: mod_base = OTHER; note = 2'-O-methylcytidine
  modified_base 17: mod_base = OTHER; note = 2'-O-methylguanosine
  modified_base 18: mod_base = OTHER; note = 2'-O-methylguanosine
  modified_base 19: mod_base = OTHER; note = 2'-O-methylguanosine with phosphorothioate linkage
  modified_base 20: mod_base = OTHER; note = 2'-O-methylguanosine with phosphorothioate linkage
  modified_base 21: mod_base = OTHER; note = 2'-O-methyladenosine
cacgagaacagctcgcgggga

SEQ ID NO: 3054 - RNA, 21 nt, synthetic construct
  source 1..21: mol_type = other RNA
  modified_base 1: mod_base = OTHER; note = 2'-O-methylguanosine with phosphorothioate linkage
  modified_base 2: mod_base = OTHER; note = 2'-O-methylguanosine with phosphorothioate linkage
  modified_base 3: mod_base = OTHER; note = 2'-O-methylguanosine
  modified_base 4: mod_base = OTHER; note = 2'-O-methylcytidine
  modified_base 5: mod_base = OTHER; note = 2'-O-methylguanosine
  modified_base 6: mod_base = OTHER; note = 2'-O-methyladenosine
  modified_base 7: mod_base = OTHER; note = 2'-fluoroguanosine
  modified_base 8: mod_base = OTHER; note = 2'-O-methyladenosine
  modified_base 9: mod_base = OTHER; note = 2'-fluoroadenosine
  modified_base 10: mod_base = OTHER; note = 2'-fluoroguanosine
  modified_base 11: mod_base = OTHER; note = 2'-fluorocytidine
  modified_base 12: mod_base = OTHER; note = 2'-O-methyladenosine
  modified_base 13: mod_base = OTHER; note = 2'-O-methyluridine
  modified_base 14: mod_base = OTHER; note = 2'-O-methyladenosine
  modified_base 15: mod_base = OTHER; note = 2'-O-methyladenosine
  modified_base 16: mod_base = OTHER; note = 2'-O-methylguanosine
  modified_base 17: mod_base = OTHER; note = 2'-O-methylcytidine
  modified_base 18: mod_base = OTHER; note = 2'-O-methylguanosine
  modified_base 19: mod_base = OTHER; note = 2'-O-methylcytidine with phosphorothioate linkage
  modified_base 20: mod_base = OTHER; note = 2'-O-methylguanosine with phosphorothioate linkage
  modified_base 21: mod_base = OTHER; note = 2'-O-methyladenosine
gggcgagaagcataagcgcga

SEQ ID NO: 3055 - RNA, 21 nt, synthetic construct
  source 1..21: mol_type = other RNA
  modified_base 1: mod_base = OTHER; note = 2'-O-methylguanosine with phosphorothioate linkage
  modified_base 2: mod_base = OTHER; note = 2'-O-methyladenosine with phosphorothioate linkage
  modified_base 3: mod_base = OTHER; note = 2'-O-methylguanosine
  modified_base 4: mod_base = OTHER; note = 2'-O-methyladenosine
  modified_base 5: mod_base = OTHER; note = 2'-O-methyladenosine
  modified_base 6: mod_base = OTHER; note = 2'-O-methylguanosine
  modified_base 7: mod_base = OTHER; note = 2'-fluorocytidine
  modified_base 8: mod_base = OTHER; note = 2'-O-methyladenosine
  modified_base 9: mod_base = OTHER; note = 2'-fluorouridine
  modified_base 10: mod_base = OTHER; note = 2'-fluoroadenosine
  modified_base 11: mod_base = OTHER; note = 2'-fluoroadenosine
  modified_base 12: mod_base = OTHER; note = 2'-O-methylguanosine
  modified_base 13: mod_base = OTHER; note = 2'-O-methylcytidine
  modified_base 14: mod_base = OTHER; note = 2'-O-methylguanosine
  modified_base 15: mod_base = OTHER; note = 2'-O-methylcytidine
  modified_base 16: mod_base = OTHER; note = 2'-O-methylguanosine
  modified_base 17: mod_base = OTHER; note = 2'-O-methylguanosine
  modified_base 18: mod_base = OTHER; note = 2'-O-methylcytidine
  modified_base 19: mod_base = OTHER; note = 2'-O-methylcytidine with phosphorothioate linkage
  modified_base 20: mod_base = OTHER; note = 2'-O-methyladenosine with phosphorothioate linkage
  modified_base 21: mod_base = OTHER; note = 2'-O-methyladenosine
gagaagcataagcgcggccaa

SEQ ID NO: 3056 - RNA, 21 nt, synthetic construct
  source 1..21: mol_type = other RNA
  modified_base 1: mod_base = OTHER; note = 2'-O-methylcytidine with phosphorothioate linkage
  modified_base 2: mod_base = OTHER; note = 2'-O-methyladenosine with phosphorothioate linkage
  modified_base 3: mod_base = OTHER; note = 2'-O-methylcytidine
  modified_base 4: mod_base = OTHER; note = 2'-O-methyladenosine
  modified_base 5: mod_base = OTHER; note = 2'-O-methylguanosine
  modified_base 6: mod_base = OTHER; note = 2'-O-methylguanosine
  modified_base 7: mod_base = OTHER; note = 2'-fluoroguanosine
  modified_base 8: mod_base = OTHER; note = 2'-O-methyladenosine
  modified_base 9: mod_base = OTHER; note = 2'-fluorocytidine
  modified_base 10: mod_base = OTHER; note = 2'-fluoroadenosine
  modified_base 11: mod_base = OTHER; note = 2'-fluorocytidine
  modified_base 12: mod_base = OTHER; note = 2'-O-methyluridine
  modified_base 13: mod_base = OTHER; note = 2'-O-methyluridine
  modified_base 14: mod_base = OTHER; note = 2'-O-methylguanosine
  modified_base 15: mod_base = OTHER; note = 2'-O-methylcytidine
  modified_base 16: mod_base = OTHER; note = 2'-O-methylguanosine
  modified_base 17: mod_base = OTHER; note = 2'-O-methyladenosine
  modified_base 18: mod_base = OTHER; note = 2'-O-methylcytidine
  modified_base 19: mod_base = OTHER; note = 2'-O-methylguanosine with phosphorothioate linkage
  modified_base 20: mod_base = OTHER; note = 2'-O-methyladenosine with phosphorothioate linkage
  modified_base 21: mod_base = OTHER; note = 2'-O-methyladenosine
cacagggacacttgcgacgaa

SEQ ID NO: 3057 - RNA, 21 nt, synthetic construct
  source 1..21: mol_type = other RNA
  modified_base 1: mod_base = OTHER; note = 2'-O-methyluridine with phosphorothioate linkage
  modified_base 2: mod_base = OTHER; note = 2'-O-methylguanosine with phosphorothioate linkage
  modified_base 3: mod_base = OTHER; note = 2'-O-methylcytidine
  modified_base 4: mod_base = OTHER; note = 2'-O-methylguanosine
  modified_base 5: mod_base = OTHER; note = 2'-O-methyladenosine
  modified_base 6: mod_base = OTHER; note = 2'-O-methylcytidine
  modified_base 7: mod_base = OTHER; note = 2'-fluoroguanosine
  modified_base 8: mod_base = OTHER; note = 2'-O-methyladenosine
  modified_base 9: mod_base = OTHER; note = 2'-fluoroadenosine
  modified_base 10: mod_base = OTHER; note = 2'-fluoroguanosine
  modified_base 11: mod_base = OTHER; note = 2'-fluoroadenosine
  modified_base 12: mod_base = OTHER; note = 2'-O-methylcytidine
  modified_base 13: mod_base = OTHER; note = 2'-O-methyluridine
  modified_base 14: mod_base = OTHER; note = 2'-O-methylcytidine
  modified_base 15: mod_base = OTHER; note = 2'-O-methylguanosine
  modified_base 16: mod_base = OTHER; note = 2'-O-methylguanosine
  modified_base 17: mod_base = OTHER; note = 2'-O-methyluridine
  modified_base 18: mod_base = OTHER; note = 2'-O-methylguanosine
  modified_base 19: mod_base = OTHER; note = 2'-O-methylguanosine with phosphorothioate linkage
  modified_base 20: mod_base = OTHER; note = 2'-O-methylcytidine with phosphorothioate linkage
  modified_base 21: mod_base = OTHER; note = 2'-O-methyladenosine
tgcgacgaagactcggtggca

SEQ ID NO: 3058 - RNA, 21 nt, synthetic construct
  source 1..21: mol_type = other RNA
  modified_base 1: mod_base = OTHER; note = 2'-O-methylguanosine with phosphorothioate linkage
  modified_base 2: mod_base = OTHER; note = 2'-O-methyladenosine with phosphorothioate linkage
  modified_base 3: mod_base = OTHER; note = 2'-O-methylcytidine
  modified_base 4: mod_base = OTHER; note = 2'-O-methyluridine
  modified_base 5: mod_base = OTHER; note = 2'-O-methylcytidine
  modified_base 6: mod_base = OTHER; note = 2'-O-methylguanosine
  modified_base 7: mod_base = OTHER; note = 2'-fluoroguanosine
  modified_base 8: mod_base = OTHER; note = 2'-O-methyluridine
  modified_base 9: mod_base = OTHER; note = 2'-fluoroguanosine
  modified_base 10: mod_base = OTHER; note = 2'-fluoroguanosine
  modified_base 11: mod_base = OTHER; note = 2'-fluorocytidine
  modified_base 12: mod_base = OTHER; note = 2'-O-methylcytidine
  modified_base 13: mod_base = OTHER; note = 2'-O-methylguanosine
  modified_base 14: mod_base = OTHER; note = 2'-O-methylguanosine
  modified_base 15: mod_base = OTHER; note = 2'-O-methylcytidine
  modified_base 16: mod_base = OTHER; note = 2'-O-methylguanosine
  modified_base 17: mod_base = OTHER; note = 2'-O-methyladenosine
  modified_base 18: mod_base = OTHER; note = 2'-O-methylguanosine
  modified_base 19: mod_base = OTHER; note = 2'-O-methyluridine with phosphorothioate linkage
  modified_base 20: mod_base = OTHER; note = 2'-O-methylcytidine with phosphorothioate linkage
  modified_base 21: mod_base = OTHER; note = 2'-O-methyladenosine
gactcggtggccggcgagtca

SEQ ID NO: 3059 - RNA, 21 nt, synthetic construct
  source 1..21: mol_type = other RNA
  modified_base 1: mod_base = OTHER; note = 2'-O-methylguanosine with phosphorothioate linkage
  modified_base 2: mod_base = OTHER; note = 2'-O-methylcytidine with phosphorothioate linkage
  modified_base 3: mod_base = OTHER; note = 2'-O-methylcytidine
  modified_base 4: mod_base = OTHER; note = 2'-O-methylguanosine
  modified_base 5: mod_base = OTHER; note = 2'-O-methylguanosine
  modified_base 6: mod_base = OTHER; note = 2'-O-methylcytidine
  modified_base 7: mod_base = OTHER; note = 2'-fluoroguanosine
  modified_base 8: mod_base = OTHER; note = 2'-O-methyladenosine
  modified_base 9: mod_base = OTHER; note = 2'-fluoroguanosine
  modified_base 10: mod_base = OTHER; note = 2'-fluorouridine
  modified_base 11: mod_base = OTHER; note = 2'-fluorocytidine
  modified_base 12: mod_base = OTHER; note = 2'-O-methylguanosine
  modified_base 13: mod_base = OTHER; note = 2'-O-methylguanosine
  modified_base 14: mod_base = OTHER; note = 2'-O-methyladenosine
  modified_base 15: mod_base = OTHER; note = 2'-O-methylcytidine
  modified_base 16: mod_base = OTHER; note = 2'-O-methylcytidine
  modified_base 17: mod_base = OTHER; note = 2'-O-methylguanosine
  modified_base 18: mod_base = OTHER; note = 2'-O-methylcytidine
  modified_base 19: mod_base = OTHER; note = 2'-O-methyladenosine with phosphorothioate linkage
  modified_base 20: mod_base = OTHER; note = 2'-O-methyluridine with phosphorothioate linkage
  modified_base 21: mod_base = OTHER; note = 2'-O-methyladenosine
gccggcgagtcggaccgcata

SEQ ID NO: 3060 - RNA, 21 nt, synthetic construct
  source 1..21: mol_type = other RNA
  modified_base 1: mod_base = OTHER; note = 2'-O-methylcytidine with phosphorothioate linkage
  modified_base 2: mod_base = OTHER; note = 2'-O-methylguanosine with phosphorothioate linkage
  modified_base 3: mod_base = OTHER; note = 2'-O-methylguanosine
  modified_base 4: mod_base = OTHER; note = 2'-O-methylcytidine
  modified_base 5: mod_base = OTHER; note = 2'-O-methylguanosine
  modified_base 6: mod_base = OTHER; note = 2'-O-methyladenosine
  modified_base 7: mod_base = OTHER; note = 2'-fluoroguanosine
  modified_base 8: mod_base = OTHER; note = 2'-O-methyluridine
  modified_base 9: mod_base = OTHER; note = 2'-fluorocytidine
  modified_base 10: mod_base = OTHER; note = 2'-fluoroguanosine
  modified_base 11: mod_base = OTHER; note = 2'-fluoroguanosine
  modified_base 12: mod_base = OTHER; note = 2'-O-methyladenosine
  modified_base 13: mod_base = OTHER; note = 2'-O-methylcytidine
  modified_base 14: mod_base = OTHER; note = 2'-O-methylcytidine
  modified_base 15: mod_base = OTHER; note = 2'-O-methylguanosine
  modified_base 16: mod_base = OTHER; note = 2'-O-methylcytidine
  modified_base 17: mod_base = OTHER; note = 2'-O-methyladenosine
  modified_base 18: mod_base = OTHER; note = 2'-O-methyluridine
  modified_base 19: mod_base = OTHER; note = 2'-O-methyladenosine with phosphorothioate linkage
  modified_base 20: mod_base = OTHER; note = 2'-O-methylguanosine with phosphorothioate linkage
  modified_base 21: mod_base = OTHER; note = 2'-O-methyladenosine
cggcgagtcggaccgcataga

SEQ ID NO: 3061 - RNA, 21 nt, synthetic construct
  source 1..21: mol_type = other RNA
  modified_base 1: mod_base = OTHER; note = 2'-O-methylguanosine with phosphorothioate linkage
  modified_base 2: mod_base = OTHER; note = 2'-O-methylguanosine with phosphorothioate linkage
  modified_base 3: mod_base = OTHER; note = 2'-O-methylcytidine
  modified_base 4: mod_base = OTHER; note = 2'-O-methylguanosine
  modified_base 5: mod_base = OTHER; note = 2'-O-methyladenosine
  modified_base 6: mod_base = OTHER; note = 2'-O-methylguanosine
  modified_base 7: mod_base = OTHER; note = 2'-fluorouridine
  modified_base 8: mod_base = OTHER; note = 2'-O-methylcytidine
  modified_base 9: mod_base = OTHER; note = 2'-fluoroguanosine
  modified_base 10: mod_base = OTHER; note = 2'-fluoroguanosine
  modified_base 11: mod_base = OTHER; note = 2'-fluoroadenosine
  modified_base 12: mod_base = OTHER; note = 2'-O-methylcytidine
  modified_base 13: mod_base = OTHER; note = 2'-O-methylcytidine
  modified_base 14: mod_base = OTHER; note = 2'-O-methylguanosine
  modified_base 15: mod_base = OTHER; note = 2'-O-methylcytidine
  modified_base 16: mod_base = OTHER; note = 2'-O-methyladenosine
  modified_base 17: mod_base = OTHER; note = 2'-O-methyluridine
  modified_base 18: mod_base = OTHER; note = 2'-O-methyladenosine
  modified_base 19: mod_base = OTHER; note = 2'-O-methylguanosine with phosphorothioate linkage
  modified_base 20: mod_base = OTHER; note = 2'-O-methyladenosine with phosphorothioate linkage
  modified_base 21: mod_base = OTHER; note = 2'-O-methyladenosine
ggcgagtcggaccgcatagaa

SEQ ID NO: 3062 - RNA, 21 nt, synthetic construct
  source 1..21: mol_type = other RNA
  modified_base 1: mod_base = OTHER; note = 2'-O-methylguanosine with phosphorothioate linkage
  modified_base 2: mod_base = OTHER; note = 2'-O-methyladenosine with phosphorothioate linkage
  modified_base 3: mod_base = OTHER; note = 2'-O-methylguanosine
  modified_base 4: mod_base = OTHER; note = 2'-O-methyluridine
  modified_base 5: mod_base = OTHER; note = 2'-O-methylcytidine
  modified_base 6: mod_base = OTHER; note = 2'-O-methylguanosine
  modified_base 7: mod_base = OTHER; note = 2'-fluoroguanosine
  modified_base 8: mod_base = OTHER; note = 2'-O-methyladenosine
  modified_base 9: mod_base = OTHER; note = 2'-fluorocytidine
  modified_base 10: mod_base = OTHER; note = 2'-fluorocytidine
  modified_base 11: mod_base = OTHER; note = 2'-fluoroguanosine
  modified_base 12: mod_base = OTHER; note = 2'-O-methylcytidine
  modified_base 13: mod_base = OTHER; note = 2'-O-methyladenosine
  modified_base 14: mod_base = OTHER; note = 2'-O-methyluridine
  modified_base 15: mod_base = OTHER; note = 2'-O-methyladenosine
  modified_base 16: mod_base = OTHER; note = 2'-O-methylguanosine
  modified_base 17: mod_base = OTHER; note = 2'-O-methyladenosine
  modified_base 18: mod_base = OTHER; note = 2'-O-methylcytidine
  modified_base 19: mod_base = OTHER; note = 2'-O-methylguanosine with phosphorothioate linkage
  modified_base 20: mod_base = OTHER; note = 2'-O-methyladenosine with phosphorothioate linkage
  modified_base 21: mod_base = OTHER; note = 2'-O-methyladenosine
gagtcggaccgcatagacgaa

SEQ ID NO: 3063 - RNA, 21 nt, synthetic construct
  source 1..21: mol_type = other RNA
  modified_base 1: mod_base = OTHER; note = 2'-O-methyladenosine with phosphorothioate linkage
  modified_base 2: mod_base = OTHER; note = 2'-O-methylguanosine with phosphorothioate linkage
  modified_base 3: mod_base = OTHER; note = 2'-O-methyluridine
  modified_base 4: mod_base = OTHER; note = 2'-O-methylcytidine
  modified_base 5: mod_base = OTHER; note = 2'-O-methylguanosine
  modified_base 6: mod_base = OTHER; note = 2'-O-methylguanosine
  modified_base 7: mod_base = OTHER; note = 2'-fluoroadenosine
  modified_base 8: mod_base = OTHER; note = 2'-O-methylcytidine
  modified_base 9: mod_base = OTHER; note = 2'-fluorocytidine
  modified_base 10: mod_base = OTHER; note = 2'-fluoroguanosine
  modified_base 11: mod_base = OTHER; note = 2'-fluorocytidine
  modified_base 12: mod_base = OTHER; note = 2'-O-methyladenosine
  modified_base 13: mod_base = OTHER; note = 2'-O-methyluridine
  modified_base 14: mod_base = OTHER; note = 2'-O-methyladenosine
  modified_base 15: mod_base = OTHER; note = 2'-O-methylguanosine
  modified_base 16: mod_base = OTHER; note = 2'-O-methyladenosine
  modified_base 17: mod_base = OTHER; note = 2'-O-methylcytidine
  modified_base 18: mod_base = OTHER; note = 2'-O-methylguanosine
  modified_base 19: mod_base = OTHER; note = 2'-O-methyladenosine with phosphorothioate linkage
  modified_base 20: mod_base = OTHER; note = 2'-O-methyluridine with phosphorothioate linkage
  modified_base 21: mod_base = OTHER; note = 2'-O-methyladenosine
agtcggaccgcatagacgata

SEQ ID NO: 3064 - RNA, 21 nt, synthetic construct
  source 1..21: mol_type = other RNA
  modified_base 1: mod_base = OTHER; note = 2'-O-methylguanosine with phosphorothioate linkage
  modified_base 2: mod_base = OTHER; note = 2'-O-methyluridine with phosphorothioate linkage
  modified_base 3: mod_base = OTHER; note = 2'-O-methylcytidine
  modified_base 4: mod_base = OTHER; note = 2'-O-methylguanosine
  modified_base 5: mod_base = OTHER; note = 2'-O-methylguanosine
  modified_base 6: mod_base = OTHER; note = 2'-O-methyladenosine
  modified_base 7: mod_base = OTHER; note = 2'-fluorocytidine
  modified_base 8: mod_base = OTHER; note = 2'-O-methylcytidine
  modified_base 9: mod_base = OTHER; note = 2'-fluoroguanosine
  modified_base 10: mod_base = OTHER; note = 2'-fluorocytidine
  modified_base 11: mod_base = OTHER; note = 2'-fluoroadenosine
  modified_base 12: mod_base = OTHER; note = 2'-O-methyluridine
  modified_base 13: mod_base = OTHER; note = 2'-O-methyladenosine
  modified_base 14: mod_base = OTHER; note = 2'-O-methylguanosine
  modified_base 15: mod_base = OTHER; note = 2'-O-methyladenosine
  modified_base 16: mod_base = OTHER; note = 2'-O-methylcytidine
  modified_base 17: mod_base = OTHER; note = 2'-O-methylguanosine
  modified_base 18: mod_base = OTHER; note = 2'-O-methyladenosine
  modified_base 19: mod_base = OTHER; note = 2'-O-methyluridine with phosphorothioate linkage
  modified_base 20: mod_base = OTHER; note = 2'-O-methylguanosine with phosphorothioate linkage
  modified_base 21: mod_base = OTHER; note = 2'-O-methyladenosine
gtcggaccgcatagacgatga

SEQ ID NO: 3065 - RNA, 21 nt, synthetic construct
  source 1..21: mol_type = other RNA
  modified_base 1: mod_base = OTHER; note = 2'-O-methylguanosine with phosphorothioate linkage
  modified_base 2: mod_base = OTHER; note = 2'-O-methyladenosine with phosphorothioate linkage
  modified_base 3: mod_base = OTHER; note = 2'-O-methylguanosine
  modified_base 4: mod_base = OTHER; note = 2'-O-methyladenosine
  modified_base 5: mod_base = OTHER; note = 2'-O-methylcytidine
  modified_base 6: mod_base = OTHER; note = 2'-O-methyluridine
  modified_base 7: mod_base = OTHER; note = 2'-fluorocytidine
  modified_base 8: mod_base = OTHER; note = 2'-O-methylcytidine
  modified_base 9: mod_base = OTHER; note = 2'-fluoroadenosine
  modified_base 10: mod_base = OTHER; note = 2'-fluoroguanosine
  modified_base 11: mod_base = OTHER; note = 2'-fluoroadenosine
  modified_base 12: mod_base = OTHER; note = 2'-O-methylcytidine
  modified_base 13: mod_base = OTHER; note = 2'-O-methyladenosine
  modified_base 14: mod_base = OTHER; note = 2'-O-methyladenosine
  modified_base 15: mod_base = OTHER; note = 2'-O-methyluridine
  modified_base 16: mod_base = OTHER; note = 2'-O-methylcytidine
  modified_base 17: mod_base = OTHER; note = 2'-O-methylguanosine
  modified_base 18: mod_base = OTHER; note = 2'-O-methylcytidine
  modified_base 19: mod_base = OTHER; note = 2'-O-methylcytidine with phosphorothioate linkage
  modified_base 20: mod_base = OTHER; note = 2'-O-methyluridine with phosphorothioate linkage
  modified_base 21: mod_base = OTHER; note = 2'-O-methyladenosine
gagactccagacaatcgccta

SEQ ID NO: 3066 - RNA, 21 nt, synthetic construct
  source 1..21: mol_type = other RNA
  modified_base 1: mod_base = OTHER; note = 2'-O-methylguanosine with phosphorothioate linkage
  modified_base 2: mod_base = OTHER; note = 2'-O-methylcytidine with phosphorothioate linkage
  modified_base 3: mod_base = OTHER; note = 2'-O-methylcytidine
  modified_base 4: mod_base = OTHER; note = 2'-O-methyluridine
  modified_base 5: mod_base = OTHER; note = 2'-O-methyluridine
  modified_base 6: mod_base = OTHER; note = 2'-O-methyluridine
  modified_base 7: mod_base = OTHER; note = 2'-fluorouridine
  modified_base 8: mod_base = OTHER; note = 2'-O-methylguanosine
  modified_base 9: mod_base = OTHER; note = 2'-fluorocytidine
  modified_base 10: mod_base = OTHER; note = 2'-fluorocytidine
  modified_base 11: mod_base = OTHER; note = 2'-fluorouridine
  modified_base 12: mod_base = OTHER; note = 2'-O-methylcytidine
  modified_base 13: mod_base = OTHER; note = 2'-O-methylcytidine
  modified_base 14: mod_base = OTHER; note = 2'-O-methyluridine
  modified_base 15: mod_base = OTHER; note = 2'-O-methylcytidine
  modified_base 16: mod_base = OTHER; note = 2'-O-methylguanosine
  modified_base 17: mod_base = OTHER; note = 2'-O-methyluridine
  modified_base 18: mod_base = OTHER; note = 2'-O-methylcytidine
  modified_base 19: mod_base = OTHER; note = 2'-O-methylguanosine with phosphorothioate linkage
  modified_base 20: mod_base = OTHER; note = 2'-O-methylguanosine with phosphorothioate linkage
  modified_base 21: mod_base = OTHER; note = 2'-O-methyladenosine
gccttttgcctcctcgtcgga

SEQ ID NO: 3067 - RNA, 21 nt, synthetic construct
  source 1..21: mol_type = other RNA
  modified_base 1: mod_base = OTHER; note = 2'-O-methylcytidine with phosphorothioate linkage
  modified_base 2: mod_base = OTHER; note = 2'-O-methyluridine with phosphorothioate linkage
  modified_base 3: mod_base = OTHER; note = 2'-O-methylcytidine
  modified_base 4: mod_base = OTHER; note = 2'-O-methylguanosine
  modified_base 5: mod_base = OTHER; note = 2'-O-methyluridine
  modified_base 6: mod_base = OTHER; note = 2'-O-methylcytidine
  modified_base 7: mod_base = OTHER; note = 2'-fluoroguanosine
  modified_base 8: mod_base = OTHER; note = 2'-O-methylguanosine
  modified_base 9: mod_base = OTHER; note = 2'-fluoroadenosine
  modified_base 10: mod_base = OTHER; note = 2'-fluoroguanosine
  modified_base 11: mod_base = OTHER; note = 2'-fluorocytidine
  modified_base 12: mod_base = OTHER; note = 2'-O-methyladenosine
  modified_base 13: mod_base = OTHER; note = 2'-O-methylcytidine
  modified_base 14: mod_base = OTHER; note = 2'-O-methyluridine
  modified_base 15: mod_base = OTHER; note = 2'-O-methylcytidine
  modified_base 16: mod_base = OTHER; note = 2'-O-methylcytidine
  modified_base 17: mod_base = OTHER; note = 2'-O-methyluridine
  modified_base 18: mod_base = OTHER; note = 2'-O-methylcytidine
  modified_base 19: mod_base = OTHER; note = 2'-O-methylguanosine with phosphorothioate linkage
  modified_base 20: mod_base = OTHER; note = 2'-O-methylguanosine with phosphorothioate linkage
  modified_base 21: mod_base = OTHER; note = 2'-O-methyladenosine
ctcgtcggagcactcctcgga

SEQ ID NO: 3068 - RNA, 21 nt, synthetic construct
  source 1..21: mol_type = other RNA
  modified_base 1: mod_base = OTHER; note = 2'-O-methylcytidine with phosphorothioate linkage
  modified_base 2: mod_base = OTHER; note = 2'-O-methylguanosine with phosphorothioate linkage
  modified_base 3: mod_base = OTHER; note = 2'-O-methyluridine
  modified_base 4: mod_base = OTHER; note = 2'-O-methylcytidine
  modified_base 5: mod_base = OTHER; note = 2'-O-methylguanosine
  modified_base 6: mod_base = OTHER; note = 2'-O-methylguanosine
  modified_base 7: mod_base = OTHER; note = 2'-fluoroadenosine
  modified_base 8: mod_base = OTHER; note = 2'-O-methylguanosine
  modified_base 9: mod_base = OTHER; note = 2'-fluorocytidine
  modified_base 10: mod_base = OTHER; note = 2'-fluoroadenosine
  modified_base 11: mod_base = OTHER; note = 2'-fluorocytidine
  modified_base 12: mod_base = OTHER; note = 2'-O-methyluridine
  modified_base 13: mod_base = OTHER; note = 2'-O-methylcytidine
  modified_base 14: mod_base = OTHER; note = 2'-O-methylcytidine
  modified_base 15: mod_base = OTHER; note = 2'-O-methyluridine
  modified_base 16: mod_base = OTHER; note = 2'-O-methylcytidine
  modified_base 17: mod_base = OTHER; note = 2'-O-methylguanosine
  modified_base 18: mod_base = OTHER; note = 2'-O-methylguanosine
  modified_base 19: mod_base = OTHER; note = 2'-O-methyladenosine with phosphorothioate linkage
  modified_base 20: mod_base = OTHER; note = 2'-O-methylguanosine with phosphorothioate linkage
  modified_base 21: mod_base = OTHER; note = 2'-O-methyladenosine
cgtcggagcactcctcggaga

SEQ ID NO: 3069 - RNA, 21 nt, synthetic construct
  source 1..21: mol_type = other RNA
  modified_base 1: mod_base = OTHER; note = 2'-O-methylguanosine with phosphorothioate linkage
  modified_base 2: mod_base = OTHER; note = 2'-O-methyladenosine with phosphorothioate linkage
  modified_base 3: mod_base = OTHER; note = 2'-O-methylguanosine
  modified_base 4: mod_base = OTHER; note = 2'-O-methylcytidine
  modified_base 5: mod_base = OTHER; note = 2'-O-methyladenosine
  modified_base 6: mod_base = OTHER; note = 2'-O-methylcytidine
  modified_base 7: mod_base = OTHER; note = 2'-fluorouridine
  modified_base 8: mod_base = OTHER; note = 2'-O-methylcytidine
  modified_base 9: mod_base = OTHER; note = 2'-fluorocytidine
  modified_base 10: mod_base = OTHER; note = 2'-fluorouridine
  modified_base 11: mod_base = OTHER; note = 2'-fluorocytidine
  modified_base 12: mod_base = OTHER; note = 2'-O-methylguanosine
  modified_base 13: mod_base = OTHER; note = 2'-O-methylguanosine
  modified_base 14: mod_base = OTHER; note = 2'-O-methyladenosine
  modified_base 15: mod_base = OTHER; note = 2'-O-methylguanosine
  modified_base 16: mod_base = OTHER; note = 2'-O-methyladenosine
  modified_base 17: mod_base = OTHER; note = 2'-O-methyladenosine
  modified_base 18: mod_base = OTHER; note = 2'-O-methylcytidine
  modified_base 19: mod_base = OTHER; note = 2'-O-methylguanosine with phosphorothioate linkage
  modified_base 20: mod_base = OTHER; note = 2'-O-methylguanosine with phosphorothioate linkage
  modified_base 21: mod_base = OTHER; note = 2'-O-methyladenosine
gagcactcctcggagaacgga

SEQ ID NO: 3070 - RNA, 21 nt, synthetic construct
  source 1..21: mol_type = other RNA
  modified_base 1: mod_base = OTHER; note = 2'-O-methylguanosine with phosphorothioate linkage
  modified_base 2: mod_base = OTHER; note = 2'-O-methyladenosine with phosphorothioate linkage
  modified_base 3: mod_base = OTHER; note = 2'-O-methylguanosine
  modified_base 4: mod_base = OTHER; note = 2'-O-methylcytidine
  modified_base 5: mod_base = OTHER; note = 2'-O-methyladenosine
  modified_base 6: mod_base = OTHER; note = 2'-O-methylcytidine
  modified_base 7: mod_base = OTHER; note = 2'-fluoroguanosine
  modified_base 8: mod_base = OTHER; note = 2'-O-methylcytidine
  modified_base 9: mod_base = OTHER; note = 2'-fluorocytidine
  modified_base 10: mod_base = OTHER; note = 2'-fluorocytidine
  modified_base 11: mod_base = OTHER; note = 2'-fluorocytidine
  modified_base 12: mod_base = OTHER; note = 2'-O-methyladenosine
  modified_base 13: mod_base = OTHER; note = 2'-O-methyluridine
  modified_base 14: mod_base = OTHER; note = 2'-O-methyladenosine
  modified_base 15: mod_base = OTHER; note = 2'-O-methyluridine
  modified_base 16: mod_base = OTHER; note = 2'-O-methyluridine
  modified_base 17: mod_base = OTHER; note = 2'-O-methyladenosine
  modified_base 18: mod_base = OTHER; note = 2'-O-methylguanosine
  modified_base 19: mod_base = OTHER; note = 2'-O-methyluridine with phosphorothioate linkage
  modified_base 20: mod_base = OTHER; note = 2'-O-methylguanosine with phosphorothioate linkage
  modified_base 21: mod_base = OTHER; note = 2'-O-methyladenosine
gagcacgccccatattagtga

SEQ ID NO: 3071 - RNA, 21 nt, synthetic construct
  source 1..21: mol_type = other RNA
  modified_base 1: mod_base = OTHER; note = 2'-O-methyladenosine with phosphorothioate linkage
  modified_base 2: mod_base = OTHER; note = 2'-O-methylguanosine with phosphorothioate linkage
  modified_base 3: mod_base = OTHER; note = 2'-O-methylcytidine
  modified_base 4: mod_base = OTHER; note = 2'-O-methyladenosine
  modified_base 5: mod_base = OTHER; note = 2'-O-methylcytidine
  modified_base 6: mod_base = OTHER; note = 2'-O-methylguanosine
  modified_base 7: mod_base = OTHER; note = 2'-fluorocytidine
  modified_base 8: mod_base = OTHER; note = 2'-O-methylcytidine
  modified_base 9: mod_base = OTHER; note = 2'-fluorocytidine
  modified_base 10: mod_base = OTHER; note = 2'-fluorocytidine
  modified_base 11: mod_base = OTHER; note = 2'-fluoroadenosine
  modified_base 12: mod_base = OTHER; note = 2'-O-methyluridine
  modified_base 13: mod_base = OTHER; note = 2'-O-methyladenosine
  modified_base 14: mod_base = OTHER; note = 2'-O-methyluridine
  modified_base 15: mod_base = OTHER; note = 2'-O-methyluridine
  modified_base 16: mod_base = OTHER; note = 2'-O-methyladenosine
  modified_base 17: mod_base = OTHER; note = 2'-O-methylguanosine
  modified_base 18: mod_base = OTHER; note = 2'-O-methyluridine
  modified_base 19: mod_base = OTHER; note = 2'-O-methylguanosine with phosphorothioate linkage
  modified_base 20: mod_base = OTHER; note = 2'-O-methylguanosine with phosphorothioate linkage
  modified_base 21: mod_base = OTHER; note = 2'-O-methyladenosine
agcacgccccatattagtgga

SEQ ID NO: 3072 - RNA, 21 nt, synthetic construct
  source 1..21: mol_type = other RNA
  modified_base 1: mod_base = OTHER; note = 2'-O-methylcytidine with phosphorothioate linkage
  modified_base 2: mod_base = OTHER; note = 2'-O-methyladenosine with phosphorothioate linkage
  modified_base 3: mod_base = OTHER; note = 2'-O-methylcytidine
  modified_base 4: mod_base = OTHER; note = 2'-O-methylguanosine
  modified_base 5: mod_base = OTHER; note = 2'-O-methylcytidine
  modified_base 6: mod_base = OTHER; note = 2'-O-methylcytidine
  modified_base 7: mod_base = OTHER; note = 2'-fluorocytidine
  modified_base 8: mod_base = OTHER; note = 2'-O-methylcytidine
  modified_base 9: mod_base = OTHER; note = 2'-fluoroadenosine
  modified_base 10: mod_base = OTHER; note = 2'-fluorouridine
  modified_base 11: mod_base = OTHER; note = 2'-fluoroadenosine
  modified_base 12: mod_base = OTHER; note = 2'-O-methyluridine
  modified_base 13: mod_base = OTHER; note = 2'-O-methyluridine
  modified_base 14: mod_base = OTHER; note = 2'-O-methyladenosine
  modified_base 15: mod_base = OTHER; note = 2'-O-methylguanosine
  modified_base 16: mod_base = OTHER; note = 2'-O-methyluridine
  modified_base 17: mod_base = OTHER; note = 2'-O-methylguanosine
  modified_base 18: mod_base = OTHER; note = 2'-O-methylguanosine
  modified_base 19: mod_base = OTHER; note = 2'-O-methyluridine with phosphorothioate linkage
  modified_base 20: mod_base = OTHER; note = 2'-O-methylcytidine with phosphorothioate linkage
  modified_base 21: mod_base = OTHER; note = 2'-O-methyladenosine
cacgccccatattagtggtca

SEQ ID NO: 3073 - RNA, 21 nt, synthetic construct
  source 1..21: mol_type = other RNA
  modified_base 1: mod_base = OTHER; note = 2'-O-methylcytidine with phosphorothioate linkage
  modified_base 2: mod_base = OTHER; note = 2'-O-methylcytidine with phosphorothioate linkage
  modified_base 3: mod_base = OTHER; note = 2'-O-methylcytidine
  modified_base 4: mod_base = OTHER; note = 2'-O-methyladenosine
  modified_base 5: mod_base = OTHER; note = 2'-O-methyluridine
  modified_base 6: mod_base = OTHER; note = 2'-O-methyladenosine
  modified_base 7: mod_base = OTHER; note = 2'-fluorouridine
  modified_base 8: mod_base = OTHER; note = 2'-O-methyluridine
  modified_base 9: mod_base = OTHER; note = 2'-fluoroadenosine
  modified_base 10: mod_base = OTHER; note = 2'-fluoroguanosine
  modified_base 11: mod_base = OTHER; note = 2'-fluorouridine
  modified_base 12: mod_base = OTHER; note = 2'-O-methylguanosine
  modified_base 13: mod_base = OTHER; note = 2'-O-methylguanosine
  modified_base 14: mod_base = OTHER; note = 2'-O-methyluridine
  modified_base 15: mod_base = OTHER; note = 2'-O-methylcytidine
  modified_base 16: mod_base = OTHER; note = 2'-O-methylcytidine
  modified_base 17: mod_base = OTHER; note = 2'-O-methylguanosine
  modified_base 18: mod_base = OTHER; note = 2'-O-methylguanosine
  modified_base 19: mod_base = OTHER; note = 2'-O-methylguanosine with phosphorothioate linkage
  modified_base 20: mod_base = OTHER; note = 2'-O-methylcytidine with phosphorothioate linkage
  modified_base 21: mod_base = OTHER; note = 2'-O-methyladenosine
cccatattagtggtccgggca

SEQ ID NO: 3074 - RNA, 21 nt, synthetic construct
  source 1..21: mol_type = other RNA
  modified_base 1: mod_base = OTHER; note = 2'-O-methyluridine with phosphorothioate linkage
  modified_base 2: mod_base = OTHER; note = 2'-O-methyladenosine with phosphorothioate linkage
  modified_base 3: mod_base = OTHER; note = 2'-O-methyluridine
  modified_base 4: mod_base = OTHER; note = 2'-O-methyluridine
  modified_base 5: mod_base = OTHER; note = 2'-O-methyladenosine
  modified_base 6: mod_base = OTHER; note = 2'-O-methylguanosine
  modified_base 7: mod_base = OTHER; note = 2'-fluorouridine
  modified_base 8: mod_base = OTHER; note = 2'-O-methylguanosine
  modified_base 9: mod_base = OTHER; note = 2'-fluoroguanosine
  modified_base 10: mod_base = OTHER; note = 2'-fluorouridine
  modified_base 11: mod_base = OTHER; note = 2'-fluorocytidine
  modified_base 12: mod_base = OTHER; note = 2'-O-methylcytidine
  modified_base 13: mod_base = OTHER; note = 2'-O-methylguanosine
  modified_base 14: mod_base = OTHER; note = 2'-O-methylguanosine
  modified_base 15: mod_base = OTHER; note = 2'-O-methylguanosine
  modified_base 16: mod_base = OTHER; note = 2'-O-methylcytidine
  modified_base 17: mod_base = OTHER; note = 2'-O-methylcytidine
  modified_base 18: mod_base = OTHER; note = 2'-O-methylcytidine
  modified_base 19: mod_base = OTHER; note = 2'-O-methylguanosine with phosphorothioate linkage
  modified_base 20: mod_base = OTHER; note = 2'-O-methylguanosine with phosphorothioate linkage
  modified_base 21: mod_base = OTHER; note = 2'-O-methyladenosine
tattagtggtccgggcccgga

SEQ ID NO: 3075 - RNA, 21 nt, synthetic construct
  source 1..21: mol_type = other RNA
  modified_base 1: mod_base = OTHER; note = 2'-O-methyluridine with phosphorothioate linkage
  modified_base 2: mod_base = OTHER; note = 2'-O-methyluridine with phosphorothioate linkage
  modified_base 3: mod_base = OTHER; note = 2'-O-methyluridine
  modified_base 4: mod_base = OTHER; note = 2'-O-methylguanosine
  modified_base 5: mod_base = OTHER; note = 2'-O-methyluridine
  modified_base 6: mod_base = OTHER; note = 2'-O-methyladenosine
  modified_base 7: mod_base = OTHER; note = 2'-fluoroadenosine
  modified_base 8: mod_base = OTHER; note = 2'-O-methylguanosine
  modified_base 9: mod_base = OTHER; note = 2'-fluoroadenosine
  modified_base 10: mod_base = OTHER; note = 2'-fluorouridine
  modified_base 11: mod_base = OTHER; note = 2'-fluoroguanosine
  modified_base 12: mod_base = OTHER; note = 2'-O-methylcytidine
  modified_base 13: mod_base = OTHER; note = 2'-O-methylcytidine
  modified_base 14: mod_base = OTHER; note = 2'-O-methyluridine
  modified_base 15: mod_base = OTHER; note = 2'-O-methyluridine
  modified_base 16: mod_base = OTHER; note = 2'-O-methyluridine
  modified_base 17: mod_base = OTHER; note = 2'-O-methyluridine
  modified_base 18: mod_base = OTHER; note = 2'-O-methyladenosine
  modified_base 19: mod_base = OTHER; note = 2'-O-methylguanosine with phosphorothioate linkage
  modified_base 20: mod_base = OTHER; note = 2'-O-methylcytidine with phosphorothioate linkage
  modified_base 21: mod_base = OTHER; note = 2'-O-methyladenosine
tttgtaagatgccttttagca

SEQ ID NO: 3076 - RNA, 21 nt, synthetic construct
  source 1..21: mol_type = other RNA
  modified_base 1: mod_base = OTHER; note = 2'-O-methyluridine with phosphorothioate linkage
  modified_base 2: mod_base = OTHER; note = 2'-O-methyluridine with phosphorothioate linkage
  modified_base 3: mod_base = OTHER; note = 2'-O-methylguanosine
  modified_base 4: mod_base = OTHER; note = 2'-O-methyluridine
  modified_base 5: mod_base = OTHER; note = 2'-O-methyladenosine
  modified_base 6: mod_base = OTHER; note = 2'-O-methyladenosine
  modified_base 7: mod_base = OTHER; note = 2'-fluoroguanosine
  modified_base 8: mod_base = OTHER; note = 2'-O-methyladenosine
  modified_base 9: mod_base = OTHER; note = 2'-fluorouridine
  modified_base 10: mod_base = OTHER; note = 2'-fluoroguanosine
  modified_base 11: mod_base = OTHER; note = 2'-fluorocytidine
  modified_base 12: mod_base = OTHER; note = 2'-O-methylcytidine
  modified_base 13: mod_base = OTHER; note = 2'-O-methyluridine
  modified_base 14: mod_base = OTHER; note = 2'-O-methyluridine
  modified_base 15: mod_base = OTHER; note = 2'-O-methyluridine
  modified_base 16: mod_base = OTHER; note = 2'-O-methyluridine
  modified_base 17: mod_base = OTHER; note = 2'-O-methyladenosine
  modified_base 18: mod_base = OTHER; note = 2'-O-methylguanosine
  modified_base 19: mod_base = OTHER; note = 2'-O-methylcytidine with phosphorothioate linkage
  modified_base 20: mod_base = OTHER; note = 2'-O-methylguanosine with phosphorothioate linkage
  modified_base 21: mod_base = OTHER; note = 2'-O-methyladenosine
ttgtaagatgccttttagcga

SEQ ID NO: 3077 - RNA, 21 nt, synthetic construct
  source 1..21: mol_type = other RNA
  modified_base 1: mod_base = OTHER; note = 2'-O-methyluridine with phosphorothioate linkage
  modified_base 2: mod_base = OTHER; note = 2'-O-methylguanosine with phosphorothioate linkage
  modified_base 3: mod_base = OTHER; note = 2'-O-methyluridine
  modified_base 4: mod_base = OTHER; note = 2'-O-methyladenosine
  modified_base 5: mod_base = OTHER; note = 2'-O-methyladenosine
  modified_base 6: mod_base = OTHER; note = 2'-O-methylguanosine
  modified_base 7: mod_base = OTHER; note = 2'-fluoroadenosine
  modified_base 8: mod_base = OTHER; note = 2'-O-methyluridine
  modified_base 9: mod_base = OTHER; note = 2'-fluoroguanosine
  modified_base 10: mod_base = OTHER; note = 2'-fluorocytidine
  modified_base 11: mod_base = OTHER; note = 2'-fluorocytidine
  modified_base 12: mod_base = OTHER; note = 2'-O-methyluridine
  modified_base 13: mod_base = OTHER; note = 2'-O-methyluridine
  modified_base 14: mod_base = OTHER; note = 2'-O-methyluridine
  modified_base 15: mod_base = OTHER; note = 2'-O-methyluridine
  modified_base 16: mod_base = OTHER; note = 2'-O-methyladenosine
  modified_base 17: mod_base = OTHER; note = 2'-O-methylguanosine
  modified_base 18: mod_base = OTHER; note = 2'-O-methylcytidine
  modified_base 19: mod_base = OTHER; note = 2'-O-methylguanosine with phosphorothioate linkage
  modified_base 20: mod_base = OTHER; note = 2'-O-methyluridine with phosphorothioate linkage
  modified_base 21: mod_base = OTHER; note = 2'-O-methyladenosine
tgtaagatgccttttagcgta

SEQ ID NO: 3078 - RNA, 21 nt, synthetic construct
  source 1..21: mol_type = other RNA
  modified_base 1: mod_base = OTHER; note = 2'-O-methyladenosine with phosphorothioate linkage
  modified_base 2: mod_base = OTHER; note = 2'-O-methyladenosine with phosphorothioate linkage
  modified_base 3: mod_base = OTHER; note = 2'-O-methylguanosine
  modified_base 4: mod_base = OTHER; note = 2'-O-methyladenosine
  modified_base 5: mod_base = OTHER; note = 2'-O-methyluridine
  modified_base 6: mod_base = OTHER; note = 2'-O-methylguanosine
  modified_base 7: mod_base = OTHER; note = 2'-fluorocytidine
  modified_base 8: mod_base = OTHER; note = 2'-O-methylcytidine
  modified_base 9: mod_base = OTHER; note = 2'-fluorouridine
  modified_base 10: mod_base = OTHER; note = 2'-fluorouridine
  modified_base 11: mod_base = OTHER; note = 2'-fluorouridine
  modified_base 12: mod_base = OTHER; note = 2'-O-methyluridine
  modified_base 13: mod_base = OTHER; note = 2'-O-methyladenosine
  modified_base 14: mod_base = OTHER; note = 2'-O-methylguanosine
  modified_base 15: mod_base = OTHER; note = 2'-O-methylcytidine
  modified_base 16: mod_base = OTHER; note = 2'-O-methylguanosine
  modified_base 17: mod_base = OTHER; note = 2'-O-methyluridine
  modified_base 18: mod_base = OTHER; note = 2'-O-methylguanosine
  modified_base 19: mod_base = OTHER; note = 2'-O-methyluridine with phosphorothioate linkage
  modified_base 20: mod_base = OTHER; note = 2'-O-methyladenosine with phosphorothioate linkage
  modified_base 21: mod_base = OTHER; note = 2'-O-methyladenosine
aagatgccttttagcgtgtaa

SEQ ID NO: 3079 - RNA, 21 nt, synthetic construct
  source 1..21: mol_type = other RNA
  modified_base 1: mod_base = OTHER; note = 2'-O-methylcytidine with phosphorothioate linkage
  modified_base 2: mod_base = OTHER; note = 2'-O-methyluridine with phosphorothioate linkage
  modified_base 3: mod_base = OTHER; note = 2'-O-methyluridine
  modified_base 4: mod_base = OTHER; note = 2'-O-methyluridine
  modified_base 5: mod_base = OTHER; note = 2'-O-methyluridine
  modified_base 6: mod_base = OTHER; note = 2'-O-methyladenosine
  modified_base 7: mod_base = OTHER; note = 2'-fluoroguanosine
  modified_base 8: mod_base = OTHER; note = 2'-O-methylcytidine
  modified_base 9: mod_base = OTHER; note = 2'-fluoroguanosine
  modified_base 10: mod_base = OTHER; note = 2'-fluorouridine
  modified_base 11: mod_base = OTHER; note = 2'-fluoroguanosine
  modified_base 12: mod_base = OTHER; note = 2'-O-methyluridine
  modified_base 13: mod_base = OTHER; note = 2'-O-methyladenosine
  modified_base 14: mod_base = OTHER; note = 2'-O-methylcytidine
  modified_base 15: mod_base = OTHER; note = 2'-O-methyladenosine
  modified_base 16: mod_base = OTHER; note = 2'-O-methylguanosine
  modified_base 17: mod_base = OTHER; note = 2'-O-methyluridine
  modified_base 18: mod_base = OTHER; note = 2'-O-methyladenosine
  modified_base 19: mod_base = OTHER; note = 2'-O-methylcytidine with phosphorothioate linkage
  modified_base 20: mod_base = OTHER; note = 2'-O-methylcytidine with phosphorothioate linkage
  modified_base 21: mod_base = OTHER; note = 2'-O-methyladenosine
cttttagcgtgtacagtacca

SEQ ID NO: 3080 - RNA, 21 nt, synthetic construct
  source 1..21: mol_type = other RNA
  modified_base 1: mod_base = OTHER; note = 2'-O-methyluridine with phosphorothioate linkage
  modified_base 2: mod_base = OTHER; note = 2'-O-methyluridine with phosphorothioate linkage
  modified_base 3: mod_base = OTHER; note = 2'-O-methyluridine
  modified_base 4: mod_base = OTHER; note = 2'-O-methyluridine
  modified_base 5: mod_base = OTHER; note = 2'-O-methyladenosine
  modified_base 6: mod_base = OTHER; note = 2'-O-methylguanosine
  modified_base 7: mod_base = OTHER; note = 2'-fluorocytidine
  modified_base 8: mod_base = OTHER; note = 2'-O-methylguanosine
  modified_base 9: mod_base = OTHER; note = 2'-fluorouridine
  modified_base 10: mod_base = OTHER; note = 2'-fluoroguanosine
  modified_base 11: mod_base = OTHER; note = 2'-fluorouridine
  modified_base 12: mod_base = OTHER; note = 2'-O-methyladenosine
  modified_base 13: mod_base = OTHER; note = 2'-O-methylcytidine
  modified_base 14: mod_base = OTHER; note = 2'-O-methyladenosine
  modified_base 15: mod_base = OTHER; note = 2'-O-methylguanosine
  modified_base 16: mod_base = OTHER; note = 2'-O-methyluridine
  modified_base 17: mod_base = OTHER; note = 2'-O-methyladenosine
  modified_base 18: mod_base = OTHER; note = 2'-O-methylcytidine
  modified_base 19: mod_base = OTHER; note = 2'-O-methylcytidine with phosphorothioate linkage
  modified_base 20: mod_base = OTHER; note = 2'-O-methylcytidine with phosphorothioate linkage
  modified_base 21: mod_base = OTHER; note = 2'-O-methyladenosine
ttttagcgtgtacagtaccca

SEQ ID NO: 3081 - RNA, 21 nt, synthetic construct
  source 1..21: mol_type = other RNA
  modified_base 1: mod_base = OTHER; note = 2'-O-methylguanosine with phosphorothioate linkage
  modified_base 2: mod_base = OTHER; note = 2'-O-methyluridine with phosphorothioate linkage
  modified_base 3: mod_base = OTHER; note = 2'-O-methyladenosine
  modified_base 4: mod_base = OTHER; note = 2'-O-methylcytidine
  modified_base 5: mod_base = OTHER; note = 2'-O-methyladenosine
  modified_base 6: mod_base = OTHER; note = 2'-O-methylguanosine
  modified_base 7: mod_base = OTHER; note = 2'-fluorouridine
  modified_base 8: mod_base = OTHER; note = 2'-O-methyladenosine
  modified_base 9: mod_base = OTHER; note = 2'-fluorocytidine
  modified_base 10: mod_base = OTHER; note = 2'-fluorocytidine
  modified_base 11: mod_base = OTHER; note = 2'-fluorocytidine
  modified_base 12: mod_base = OTHER; note = 2'-O-methyluridine
  modified_base 13: mod_base = OTHER; note = 2'-O-methylguanosine
  modified_base 14: mod_base = OTHER; note = 2'-O-methylguanosine
  modified_base 15: mod_base = OTHER; note = 2'-O-methyladenosine
  modified_base 16: mod_base = OTHER; note = 2'-O-methylguanosine
  modified_base 17: mod_base = OTHER; note = 2'-O-methyladenosine
  modified_base 18: mod_base = OTHER; note = 2'-O-methyladenosine
  modified_base 19: mod_base = OTHER; note = 2'-O-methyladenosine with phosphorothioate linkage
  modified_base 20: mod_base = OTHER; note = 2'-O-methylcytidine with phosphorothioate linkage
  modified_base 21: mod_base = OTHER; note = 2'-O-methyladenosine
gtacagtaccctggagaaaca

SEQ ID NO: 3082 - RNA, 21 nt, synthetic construct
  source 1..21: mol_type = other RNA
  modified_base 1: mod_base = OTHER; note = 2'-O-methyluridine with phosphorothioate linkage
  modified_base 2: mod_base = OTHER; note = 2'-O-methyladenosine with phosphorothioate linkage
  modified_base 3: mod_base = OTHER; note = 2'-O-methylcytidine
  modified_base 4: mod_base = OTHER; note = 2'-O-methyladenosine
  modified_base 5: mod_base = OTHER; note = 2'-O-methylguanosine
  modified_base 6: mod_base = OTHER; note = 2'-O-methyluridine
  modified_base 7: mod_base = OTHER; note = 2'-fluoroadenosine
  modified_base 8: mod_base = OTHER; note = 2'-O-methylcytidine
  modified_base 9: mod_base = OTHER; note = 2'-fluorocytidine
  modified_base 10: mod_base = OTHER; note = 2'-fluorocytidine
  modified_base 11: mod_base = OTHER; note = 2'-fluorouridine
  modified_base 12: mod_base = OTHER; note = 2'-O-methylguanosine
  modified_base 13: mod_base = OTHER; note = 2'-O-methylguanosine
  modified_base 14: mod_base = OTHER; note = 2'-O-methyladenosine
  modified_base 15: mod_base = OTHER; note = 2'-O-methylguanosine
  modified_base 16: mod_base = OTHER; note = 2'-O-methyladenosine
  modified_base 17: mod_base = OTHER; note = 2'-O-methyladenosine
  modified_base 18: mod_base = OTHER; note = 2'-O-methyladenosine
  modified_base 19: mod_base = OTHER; note = 2'-O-methylcytidine with phosphorothioate linkage
  modified_base 20: mod_base = OTHER; note = 2'-O-methyladenosine with phosphorothioate linkage
  modified_base 21: mod_base = OTHER; note = 2'-O-methyladenosine
tacagtaccctggagaaacaa

SEQ ID NO: 3083 - RNA, 21 nt, synthetic construct
  source 1..21: mol_type = other RNA
  modified_base 1: mod_base = OTHER; note = 2'-O-methyladenosine with phosphorothioate linkage
  modified_base 2: mod_base = OTHER; note = 2'-O-methylcytidine with phosphorothioate linkage
  modified_base 3: mod_base = OTHER; note = 2'-O-methyladenosine
  modified_base 4: mod_base = OTHER; note = 2'-O-methylguanosine
  modified_base 5: mod_base = OTHER; note = 2'-O-methyluridine
  modified_base 6: mod_base = OTHER; note = 2'-O-methyladenosine
  modified_base 7: mod_base = OTHER; note = 2'-fluorocytidine
  modified_base 8: mod_base = OTHER; note = 2'-O-methylcytidine
  modified_base 9: mod_base = OTHER; note = 2'-fluorocytidine
  modified_base 10: mod_base = OTHER; note = 2'-fluorouridine
  modified_base 11: mod_base = OTHER; note = 2'-fluoroguanosine
  modified_base 12: mod_base = OTHER; note = 2'-O-methylguanosine
  modified_base 13: mod_base = OTHER; note = 2'-O-methyladenosine
  modified_base 14: mod_base = OTHER; note = 2'-O-methylguanosine
  modified_base 15: mod_base = OTHER; note = 2'-O-methyladenosine
  modified_base 16: mod_base = OTHER; note = 2'-O-methyladenosine
  modified_base 17: mod_base = OTHER; note = 2'-O-methyladenosine
  modified_base 18: mod_base = OTHER; note = 2'-O-methylcytidine
  modified_base 19: mod_base = OTHER; note = 2'-O-methyladenosine with phosphorothioate linkage
  modified_base 20: mod_base = OTHER; note = 2'-O-methylcytidine with phosphorothioate linkage
  modified_base 21: mod_base = OTHER; note = 2'-O-methyladenosine
acagtaccctggagaaacaca

SEQ ID NO: 3084 - RNA, 21 nt, synthetic construct
  source 1..21: mol_type = other RNA
  modified_base 1: mod_base = OTHER; note = 2'-O-methylcytidine with phosphorothioate linkage
  modified_base 2: mod_base = OTHER; note = 2'-O-methyladenosine with phosphorothioate linkage
  modified_base 3: mod_base = OTHER; note = 2'-O-methylguanosine
  modified_base 4: mod_base = OTHER; note = 2'-O-methyluridine
  modified_base 5: mod_base = OTHER; note = 2'-O-methyladenosine
  modified_base 6: mod_base = OTHER; note = 2'-O-methylcytidine
  modified_base 7: mod_base = OTHER; note = 2'-fluorocytidine
  modified_base 8: mod_base = OTHER; note = 2'-O-methylcytidine
  modified_base 9: mod_base = OTHER; note = 2'-fluorouridine
  modified_base 10: mod_base = OTHER; note = 2'-fluoroguanosine
  modified_base 11: mod_base = OTHER; note = 2'-fluoroguanosine
  modified_base 12: mod_base = OTHER; note = 2'-O-methyladenosine
  modified_base 13: mod_base = OTHER; note = 2'-O-methylguanosine
  modified_base 14: mod_base = OTHER; note = 2'-O-methyladenosine
  modified_base 15: mod_base = OTHER; note = 2'-O-methyladenosine
  modified_base 16: mod_base = OTHER; note = 2'-O-methyladenosine
  modified_base 17: mod_base = OTHER; note = 2'-O-methylcytidine
  modified_base 18: mod_base = OTHER; note = 2'-O-methyladenosine
  modified_base 19: mod_base = OTHER; note = 2'-O-methylcytidine with phosphorothioate linkage
  modified_base 20: mod_base = OTHER; note = 2'-O-methyladenosine with phosphorothioate linkage
  modified_base 21: mod_base = OTHER; note = 2'-O-methyladenosine
cagtaccctggagaaacacaa

SEQ ID NO: 3085 - RNA, 21 nt, synthetic construct
  source 1..21: mol_type = other RNA
  modified_base 1: mod_base = OTHER; note = 2'-O-methyladenosine with phosphorothioate linkage
  modified_base 2: mod_base = OTHER; note = 2'-O-methylguanosine with phosphorothioate linkage
  modified_base 3: mod_base = OTHER; note = 2'-O-methyluridine
  modified_base 4: mod_base = OTHER; note = 2'-O-methyladenosine
  modified_base 5: mod_base = OTHER; note = 2'-O-methylcytidine
  modified_base 6: mod_base = OTHER; note = 2'-O-methylcytidine
  modified_base 7: mod_base = OTHER; note = 2'-fluorocytidine
  modified_base 8: mod_base = OTHER; note = 2'-O-methyluridine
  modified_base 9: mod_base = OTHER; note = 2'-fluoroguanosine
  modified_base 10: mod_base = OTHER; note = 2'-fluoroguanosine
  modified_base 11: mod_base = OTHER; note = 2'-fluoroadenosine
  modified_base 12: mod_base = OTHER; note = 2'-O-methylguanosine
  modified_base 13: mod_base = OTHER; note = 2'-O-methyladenosine
  modified_base 14: mod_base = OTHER; note = 2'-O-methyladenosine
  modified_base 15: mod_base = OTHER; note = 2'-O-methyladenosine
  modified_base 16: mod_base = OTHER; note = 2'-O-methylcytidine
  modified_base 17: mod_base = OTHER; note = 2'-O-methyladenosine
  modified_base 18: mod_base = OTHER; note = 2'-O-methylcytidine
  modified_base 19: mod_base = OTHER; note = 2'-O-methyladenosine with phosphorothioate linkage
  modified_base 20: mod_base = OTHER; note = 2'-O-methyluridine with phosphorothioate linkage
  modified_base 21: mod_base = OTHER; note = 2'-O-methyladenosine
agtaccctggagaaacacata

SEQ ID NO: 3086 - RNA, 21 nt, synthetic construct
  source 1..21: mol_type = other RNA
  modified_base 1: mod_base = OTHER; note = 2'-O-methylguanosine with phosphorothioate linkage
  modified_base 2: mod_base = OTHER; note = 2'-O-methyluridine with phosphorothioate linkage
  modified_base 3: mod_base = OTHER; note = 2'-O-methyladenosine
  modified_base 4: mod_base = OTHER; note = 2'-O-methylcytidine
  modified_base 5: mod_base = OTHER; note = 2'-O-methylcytidine
  modified_base 6: mod_base = OTHER; note = 2'-O-methylcytidine
  modified_base 7: mod_base = OTHER; note = 2'-fluorouridine
  modified_base 8: mod_base = OTHER; note = 2'-O-methylguanosine
  modified_base 9: mod_base = OTHER; note = 2'-fluoroguanosine
  modified_base 10: mod_base = OTHER; note = 2'-fluoroadenosine
  modified_base 11: mod_base = OTHER; note = 2'-fluoroguanosine
  modified_base 12: mod_base = OTHER; note = 2'-O-methyladenosine
  modified_base 13: mod_base = OTHER; note = 2'-O-methyladenosine
  modified_base 14: mod_base = OTHER; note = 2'-O-methyladenosine
  modified_base 15: mod_base = OTHER; note = 2'-O-methylcytidine
  modified_base 16: mod_base = OTHER; note = 2'-O-methyladenosine
  modified_base 17: mod_base = OTHER; note = 2'-O-methylcytidine
  modified_base 18: mod_base = OTHER; note = 2'-O-methyladenosine
  modified_base 19: mod_base = OTHER; note = 2'-O-methyluridine with phosphorothioate linkage
  modified_base 20: mod_base = OTHER; note = 2'-O-methylguanosine with phosphorothioate linkage
  modified_base 21: mod_base = OTHER; note = 2'-O-methyladenosine
gtaccctggagaaacacatga

SEQ ID NO: 3087 - RNA, 21 nt, synthetic construct
  source 1..21: mol_type = other RNA
  modified_base 1: mod_base = OTHER; note = 2'-O-methyluridine with phosphorothioate linkage
  modified_base 2: mod_base = OTHER; note = 2'-O-methyladenosine with phosphorothioate linkage
  modified_base 3: mod_base = OTHER; note = 2'-O-methylcytidine
  modified_base 4: mod_base = OTHER; note = 2'-O-methylcytidine
  modified_base 5: mod_base = OTHER; note = 2'-O-methylcytidine
  modified_base 6: mod_base = OTHER; note = 2'-O-methyluridine
  modified_base 7: mod_base = OTHER; note = 2'-fluoroguanosine
  modified_base 8: mod_base = OTHER; note = 2'-O-methylguanosine
  modified_base 9: mod_base = OTHER; note = 2'-fluoroadenosine
  modified_base 10: mod_base = OTHER; note = 2'-fluoroguanosine
  modified_base 11: mod_base = OTHER; note = 2'-fluoroadenosine
  modified_base 12: mod_base = OTHER; note = 2'-O-methyladenosine
  modified_base 13: mod_base = OTHER; note = 2'-O-methyladenosine
  modified_base 14: mod_base = OTHER; note = 2'-O-methylcytidine
  modified_base 15: mod_base = OTHER; note = 2'-O-methyladenosine
  modified_base 16: mod_base = OTHER; note = 2'-O-methylcytidine
  modified_base 17: mod_base = OTHER; note = 2'-O-methyladenosine
  modified_base 18: mod_base = OTHER; note = 2'-O-methyluridine
  modified_base 19: mod_base = OTHER; note = 2'-O-methylguanosine with phosphorothioate linkage
  modified_base 20: mod_base = OTHER; note = 2'-O-methyladenosine with phosphorothioate linkage
  modified_base 21: mod_base = OTHER; note = 2'-O-methyladenosine
taccctggagaaacacatgaa

SEQ ID NO: 3088 - RNA, 21 nt, synthetic construct
  source 1..21: mol_type = other RNA
  modified_base 1: mod_base = OTHER; note = 2'-O-methyladenosine with phosphorothioate linkage
  modified_base 2: mod_base = OTHER; note = 2'-O-methylcytidine with phosphorothioate linkage
  modified_base 3: mod_base = OTHER; note = 2'-O-methylcytidine
  modified_base 4: mod_base = OTHER; note = 2'-O-methylcytidine
  modified_base 5: mod_base = OTHER; note = 2'-O-methyluridine
  modified_base 6: mod_base = OTHER; note = 2'-O-methylguanosine
  modified_base 7: mod_base = OTHER; note = 2'-fluoroguanosine
  modified_base 8: mod_base = OTHER; note = 2'-O-methyladenosine
  modified_base 9: mod_base = OTHER; note = 2'-fluoroguanosine
  modified_base 10: mod_base = OTHER; note = 2'-fluoroadenosine
  modified_base 11: mod_base = OTHER; note = 2'-fluoroadenosine
  modified_base 12: mod_base = OTHER; note = 2'-O-methyladenosine
  modified_base 13: mod_base = OTHER; note = 2'-O-methylcytidine
  modified_base 14: mod_base = OTHER; note = 2'-O-methyladenosine
  modified_base 15: mod_base = OTHER; note = 2'-O-methylcytidine
  modified_base 16: mod_base = OTHER; note = 2'-O-methyladenosine
  modified_base 17: mod_base = OTHER; note = 2'-O-methyluridine
  modified_base 18: mod_base = OTHER; note = 2'-O-methylguanosine
  modified_base 19: mod_base = OTHER; note = 2'-O-methyladenosine with phosphorothioate linkage
  modified_base 20: mod_base = OTHER; note = 2'-O-methyladenosine with phosphorothioate linkage
  modified_base 21: mod_base = OTHER; note = 2'-O-methyladenosine
accctggagaaacacatgaaa

SEQ ID NO: 3089 - RNA, 21 nt, synthetic construct
  source 1..21: mol_type = other RNA
  modified_base 1: mod_base = OTHER; note = 2'-O-methylcytidine with phosphorothioate linkage
  modified_base 2: mod_base = OTHER; note = 2'-O-methylcytidine with phosphorothioate linkage
  modified_base 3: mod_base = OTHER; note = 2'-O-methylcytidine
  modified_base 4: mod_base = OTHER; note = 2'-O-methyluridine
  modified_base 5: mod_base = OTHER; note = 2'-O-methylguanosine
  modified_base 6: mod_base = OTHER; note = 2'-O-methylguanosine
  modified_base 7: mod_base = OTHER; note = 2'-fluoroadenosine
  modified_base 8: mod_base = OTHER; note = 2'-O-methylguanosine
  modified_base 9: mod_base = OTHER; note = 2'-fluoroadenosine
  modified_base 10: mod_base = OTHER; note = 2'-fluoroadenosine
  modified_base 11: mod_base = OTHER; note = 2'-fluoroadenosine
  modified_base 12: mod_base = OTHER; note = 2'-O-methylcytidine
  modified_base 13: mod_base = OTHER; note = 2'-O-methyladenosine
  modified_base 14: mod_base = OTHER; note = 2'-O-methylcytidine
  modified_base 15: mod_base = OTHER; note = 2'-O-methyladenosine
  modified_base 16: mod_base = OTHER; note = 2'-O-methyluridine
  modified_base 17: mod_base = OTHER; note = 2'-O-methylguanosine
  modified_base 18: mod_base = OTHER; note = 2'-O-methyladenosine
  modified_base 19: mod_base = OTHER; note = 2'-O-methyladenosine with phosphorothioate linkage
  modified_base 20: mod_base = OTHER; note = 2'-O-methyladenosine with phosphorothioate linkage
  modified_base 21: mod_base = OTHER; note = 2'-O-methyladenosine
ccctggagaaacacatgaaaa

SEQ ID NO: 3090 - RNA, 21 nt, synthetic construct
  source 1..21: mol_type = other RNA
  modified_base 1: mod_base = OTHER; note = 2'-O-methylcytidine with phosphorothioate linkage
  modified_base 2: mod_base = OTHER; note = 2'-O-methylcytidine with phosphorothioate linkage
  modified_base 3: mod_base = OTHER; note = 2'-O-methyluridine
  modified_base 4: mod_base = OTHER; note = 2'-O-methylguanosine
  modified_base 5: mod_base = OTHER; note = 2'-O-methylguanosine
  modified_base 6: mod_base = OTHER; note = 2'-O-methyladenosine
  modified_base 7: mod_base = OTHER; note = 2'-fluoroguanosine
  modified_base 8: mod_base = OTHER; note = 2'-O-methyladenosine
  modified_base 9: mod_base = OTHER; note = 2'-fluoroadenosine
  modified_base 10: mod_base = OTHER; note = 2'-fluoroadenosine
  modified_base 11: mod_base = OTHER; note = 2'-fluorocytidine
  modified_base 12: mod_base = OTHER; note = 2'-O-methyladenosine
  modified_base 13: mod_base = OTHER; note = 2'-O-methylcytidine
  modified_base 14: mod_base = OTHER; note = 2'-O-methyladenosine
  modified_base 15: mod_base = OTHER; note = 2'-O-methyluridine
  modified_base 16: mod_base = OTHER; note = 2'-O-methylguanosine
  modified_base 17: mod_base = OTHER; note = 2'-O-methyladenosine
  modified_base 18: mod_base = OTHER; note = 2'-O-methyladenosine
  modified_base 19: mod_base = OTHER; note = 2'-O-methyladenosine with phosphorothioate linkage
  modified_base 20: mod_base = OTHER; note = 2'-O-methyladenosine with phosphorothioate linkage
  modified_base 21: mod_base = OTHER; note = 2'-O-methyladenosine
cctggagaaacacatgaaaaa

SEQ ID NO: 3091 - RNA, 21 nt, synthetic construct
  source 1..21: mol_type = other RNA
  modified_base 1: mod_base = OTHER; note = 2'-O-methylcytidine with phosphorothioate linkage
  modified_base 2: mod_base = OTHER; note = 2'-O-methyluridine with phosphorothioate linkage
  modified_base 3: mod_base = OTHER; note = 2'-O-methylguanosine
  modified_base 4: mod_base = OTHER; note = 2'-O-methylguanosine
  modified_base 5: mod_base = OTHER; note = 2'-O-methyladenosine
  modified_base 6: mod_base = OTHER; note = 2'-O-methylguanosine
  modified_base 7: mod_base = OTHER; note = 2'-fluoroadenosine
  modified_base 8: mod_base = OTHER; note = 2'-O-methyladenosine
  modified_base 9: mod_base = OTHER; note = 2'-fluoroadenosine
  modified_base 10: mod_base = OTHER; note = 2'-fluorocytidine
  modified_base 11: mod_base = OTHER; note = 2'-fluoroadenosine
  modified_base 12: mod_base = OTHER; note = 2'-O-methylcytidine
  modified_base 13: mod_base = OTHER; note = 2'-O-methyladenosine
  modified_base 14: mod_base = OTHER; note = 2'-O-methyluridine
  modified_base 15: mod_base = OTHER; note = 2'-O-methylguanosine
  modified_base 16: mod_base = OTHER; note = 2'-O-methyladenosine
  modified_base 17: mod_base = OTHER; note = 2'-O-methyladenosine
  modified_base 18: mod_base = OTHER; note = 2'-O-methyladenosine
  modified_base 19: mod_base = OTHER; note = 2'-O-methyladenosine with phosphorothioate linkage
  modified_base 20: mod_base = OTHER; note = 2'-O-methyladenosine with phosphorothioate linkage
  modified_base 21: mod_base = OTHER; note = 2'-O-methyladenosine
ctggagaaacacatgaaaaaa

SEQ ID NO: 3092 - RNA, 21 nt, synthetic construct
  source 1..21: mol_type = other RNA
  modified_base 1: mod_base = OTHER; note = 2'-O-methyluridine with phosphorothioate linkage
  modified_base 2: mod_base = OTHER; note = 2'-O-methylguanosine with phosphorothioate linkage
  modified_base 3: mod_base = OTHER; note = 2'-O-methylguanosine
  modified_base 4: mod_base = OTHER; note = 2'-O-methyladenosine
  modified_base 5: mod_base = OTHER; note = 2'-O-methylguanosine
  modified_base 6: mod_base = OTHER; note = 2'-O-methyladenosine
  modified_base 7: mod_base = OTHER; note = 2'-fluoroadenosine
  modified_base 8: mod_base = OTHER; note = 2'-O-methyladenosine
  modified_base 9: mod_base = OTHER; note = 2'-fluorocytidine
  modified_base 10: mod_base = OTHER; note = 2'-fluoroadenosine
  modified_base 11: mod_base = OTHER; note = 2'-fluorocytidine
  modified_base 12: mod_base = OTHER; note = 2'-O-methyladenosine
  modified_base 13: mod_base = OTHER; note = 2'-O-methyluridine
  modified_base 14: mod_base = OTHER; note = 2'-O-methylguanosine
  modified_base 15: mod_base = OTHER; note = 2'-O-methyladenosine
  modified_base 16: mod_base = OTHER; note = 2'-O-methyladenosine
  modified_base 17: mod_base = OTHER; note = 2'-O-methyladenosine
  modified_base 18: mod_base = OTHER; note = 2'-O-methyladenosine
  modified_base 19: mod_base = OTHER; note = 2'-O-methyladenosine with phosphorothioate linkage
  modified_base 20: mod_base = OTHER; note = 2'-O-methyladenosine with phosphorothioate linkage
  modified_base 21: mod_base = OTHER; note = 2'-O-methyladenosine
tggagaaacacatgaaaaaaa

SEQ ID NO: 3093 - RNA, 21 nt, synthetic construct
  source 1..21: mol_type = other RNA
  modified_base 1: mod_base = OTHER; note = 2'-O-methylguanosine with phosphorothioate linkage
  modified_base 2: mod_base = OTHER; note = 2'-O-methylguanosine with phosphorothioate linkage
  modified_base 3: mod_base = OTHER; note = 2'-O-methyladenosine
  modified_base 4: mod_base = OTHER; note = 2'-O-methylguanosine
  modified_base 5: mod_base = OTHER; note = 2'-O-methyladenosine
  modified_base 6: mod_base = OTHER; note = 2'-O-methyladenosine
  modified_base 7: mod_base = OTHER; note = 2'-fluoroadenosine
  modified_base 8: mod_base = OTHER; note = 2'-O-methylcytidine
  modified_base 9: mod_base = OTHER; note = 2'-fluoroadenosine
  modified_base 10: mod_base = OTHER; note = 2'-fluorocytidine
  modified_base 11: mod_base = OTHER; note = 2'-fluoroadenosine
  modified_base 12: mod_base = OTHER; note = 2'-O-methyluridine
  modified_base 13: mod_base = OTHER; note = 2'-O-methylguanosine
  modified_base 14: mod_base = OTHER; note = 2'-O-methyladenosine
  modified_base 15: mod_base = OTHER; note = 2'-O-methyladenosine
  modified_base 16: mod_base = OTHER; note = 2'-O-methyladenosine
  modified_base 17: mod_base = OTHER; note = 2'-O-methyladenosine
  modified_base 18: mod_base = OTHER; note = 2'-O-methyladenosine
  modified_base 19: mod_base = OTHER; note = 2'-O-methyladenosine with phosphorothioate linkage
  modified_base 20: mod_base = OTHER; note = 2'-O-methyluridine with phosphorothioate linkage
  modified_base 21: mod_base = OTHER; note = 2'-O-methyladenosine
ggagaaacacatgaaaaaata

SEQ ID NO: 3094 - RNA, 21 nt, synthetic construct
  source 1..21: mol_type = other RNA
  modified_base 1: mod_base = OTHER; note = 2'-O-methyladenosine with phosphorothioate linkage
  modified_base 2: mod_base = OTHER; note = 2'-O-methyluridine with phosphorothioate linkage
  modified_base 3: mod_base = OTHER; note = 2'-O-methylguanosine
  modified_base 4: mod_base = OTHER; note = 2'-O-methylguanosine
  modified_base 5: mod_base = OTHER; note = 2'-O-methylcytidine
  modified_base 6: mod_base = OTHER; note = 2'-O-methyladenosine
  modified_base 7: mod_base = OTHER; note = 2'-fluorocytidine
  modified_base 8: mod_base = OTHER; note = 2'-O-methyladenosine
  modified_base 9: mod_base = OTHER; note = 2'-fluoroguanosine
  modified_base 10: mod_base = OTHER; note = 2'-fluorouridine
  modified_base 11: mod_base = OTHER; note = 2'-fluoroguanosine
  modified_base 12: mod_base = OTHER; note = 2'-O-methyladenosine
  modified_base 13: mod_base = OTHER; note = 2'-O-methyluridine
  modified_base 14: mod_base = OTHER; note = 2'-O-methylcytidine
  modified_base 15: mod_base = OTHER; note = 2'-O-methylguanosine
  modified_base 16: mod_base = OTHER; note = 2'-O-methyladenosine
  modified_base 17: mod_base = OTHER; note = 2'-O-methylguanosine
  modified_base 18: mod_base = OTHER; note = 2'-O-methyluridine
  modified_base 19: mod_base = OTHER; note = 2'-O-methylguanosine with phosphorothioate linkage
  modified_base 20: mod_base = OTHER; note = 2'-O-methyluridine with phosphorothioate linkage
  modified_base 21: mod_base = OTHER; note = 2'-O-methyladenosine
atggcacagtgatcgagtgta

SEQ ID NO: 3095 - RNA, 21 nt, synthetic construct
  source 1..21: mol_type = other RNA
  modified_base 1: mod_base = OTHER; note = 2'-O-methyladenosine with phosphorothioate linkage
  modified_base 2: mod_base = OTHER; note = 2'-O-methyladenosine with phosphorothioate linkage
  modified_base 3: mod_base = OTHER; note = 2'-O-methylcytidine
  modified_base 4: mod_base = OTHER; note = 2'-O-methyladenosine
  modified_base 5: mod_base = OTHER; note = 2'-O-methylguanosine
  modified_base 6: mod_base = OTHER; note = 2'-O-methyluridine
  modified_base 7: mod_base = OTHER; note = 2'-fluorocytidine
  modified_base 8: mod_base = OTHER; note = 2'-O-methyluridine
  modified_base 9: mod_base = OTHER; note = 2'-fluorouridine
  modified_base 10: mod_base = OTHER; note = 2'-fluorouridine
  modified_base 11: mod_base = OTHER; note = 2'-fluoroguanosine
  modified_base 12: mod_base = OTHER; note = 2'-O-methylguanosine
  modified_base 13: mod_base = OTHER; note = 2'-O-methyladenosine
  modified_base 14: mod_base = OTHER; note = 2'-O-methyluridine
  modified_base 15: mod_base = OTHER; note = 2'-O-methyluridine
  modified_base 16: mod_base = OTHER; note = 2'-O-methyladenosine
  modified_base 17: mod_base = OTHER; note = 2'-O-methyladenosine
  modified_base 18: mod_base = OTHER; note = 2'-O-methylcytidine
  modified_base 19: mod_base = OTHER; note = 2'-O-methylcytidine with phosphorothioate linkage
  modified_base 20: mod_base = OTHER; note = 2'-O-methylcytidine with phosphorothioate linkage
  modified_base 21: mod_base = OTHER; note = 2'-O-methyladenosine
aacagtctttggattaaccca

SEQ ID NO: 3096 - RNA, 21 nt, synthetic construct
  source 1..21: mol_type = other RNA
  modified_base 1: mod_base = OTHER; note = 2'-O-methylguanosine with phosphorothioate linkage
  modified_base 2: mod_base = OTHER; note = 2'-O-methylguanosine with phosphorothioate linkage
  modified_base 3: mod_base = OTHER; note = 2'-O-methyladenosine
  modified_base 4: mod_base = OTHER; note = 2'-O-methyluridine
  modified_base 5: mod_base = OTHER; note = 2'-O-methyluridine
  modified_base 6: mod_base = OTHER; note = 2'-O-methyladenosine
  modified_base 7: mod_base = OTHER; note = 2'-fluoroadenosine
  modified_base 8: mod_base = OTHER; note = 2'-O-methylcytidine
  modified_base 9: mod_base = OTHER; note = 2'-fluorocytidine
  modified_base 10: mod_base = OTHER; note = 2'-fluorocytidine
  modified_base 11: mod_base = OTHER; note = 2'-fluorouridine
  modified_base 12: mod_base = OTHER; note = 2'-O-methylcytidine
  modified_base 13: mod_base = OTHER; note = 2'-O-methyluridine
  modified_base 14: mod_base = OTHER; note = 2'-O-methyladenosine
  modified_base 15: mod_base = OTHER; note = 2'-O-methyluridine
  modified_base 16: mod_base = OTHER; note = 2'-O-methyladenosine
  modified_base 17: mod_base = OTHER; note = 2'-O-methylguanosine
  modified_base 18: mod_base = OTHER; note = 2'-O-methyladenosine
  modified_base 19: mod_base = OTHER; note = 2'-O-methylcytidine with phosphorothioate linkage
  modified_base 20: mod_base = OTHER; note = 2'-O-methyladenosine with phosphorothioate linkage
  modified_base 21: mod_base = OTHER; note = 2'-O-methyladenosine
ggattaaccctctatagacaa

SEQ ID NO: 3097 - RNA, 21 nt, synthetic construct
  source 1..21: mol_type = other RNA
  modified_base 1: mod_base = OTHER; note = 2'-O-methyladenosine with phosphorothioate linkage
  modified_base 2: mod_base = OTHER; note = 2'-O-methyluridine with phosphorothioate linkage
  modified_base 3: mod_base = OTHER; note = 2'-O-methyladenosine
  modified_base 4: mod_base = OTHER; note = 2'-O-methylguanosine
  modified_base 5: mod_base = OTHER; note = 2'-O-methyladenosine
  modified_base 6: mod_base = OTHER; note = 2'-O-methylcytidine
  modified_base 7: mod_base = OTHER; note = 2'-fluoroadenosine
  modified_base 8: mod_base = OTHER; note = 2'-O-methylguanosine
  modified_base 9: mod_base = OTHER; note = 2'-fluoroadenosine
  modified_base 10: mod_base = OTHER; note = 2'-fluoroadenosine
  modified_base 11: mod_base = OTHER; note = 2'-fluorouridine
  modified_base 12: mod_base = OTHER; note = 2'-O-methyladenosine
  modified_base 13: mod_base = OTHER; note = 2'-O-methylguanosine
  modified_base 14: mod_base = OTHER; note = 2'-O-methyladenosine
  modified_base 15: mod_base = OTHER; note = 2'-O-methyluridine
  modified_base 16: mod_base = OTHER; note = 2'-O-methyladenosine
  modified_base 17: mod_base = OTHER; note = 2'-O-methylguanosine
  modified_base 18: mod_base = OTHER; note = 2'-O-methylcytidine
  modified_base 19: mod_base = OTHER; note = 2'-O-methyladenosine with phosphorothioate linkage
  modified_base 20: mod_base = OTHER; note = 2'-O-methylcytidine with phosphorothioate linkage
  modified_base 21: mod_base = OTHER; note = 2'-O-methyladenosine
atagacagaatagatagcaca

SEQ ID NO: 3098 - RNA, 21 nt, synthetic construct
  source 1..21: mol_type = other RNA
  modified_base 1: mod_base = OTHER; note = 2'-O-methyluridine with phosphorothioate linkage
  modified_base 2: mod_base = OTHER; note = 2'-O-methyladenosine with phosphorothioate linkage
  modified_base 3: mod_base = OTHER; note = 2'-O-methyladenosine
  modified_base 4: mod_base = OTHER; note = 2'-O-methyluridine
  modified_base 5: mod_base = OTHER; note = 2'-O-methyladenosine
  modified_base 6: mod_base = OTHER; note = 2'-O-methyladenosine
  modified_base 7: mod_base = OTHER; note = 2'-fluoroadenosine
  modified_base 8: mod_base = OTHER; note = 2'-O-methylcytidine
  modified_base 9: mod_base = OTHER; note = 2'-fluorocytidine
  modified_base 10: mod_base = OTHER; note = 2'-fluorouridine
  modified_base 11: mod_base = OTHER; note = 2'-fluorouridine
  modified_base 12: mod_base = OTHER; note = 2'-O-methyladenosine
  modified_base 13: mod_base = OTHER; note = 2'-O-methylguanosine
  modified_base 14: mod_base = OTHER; note = 2'-O-methylguanosine
  modified_base 15: mod_base = OTHER; note = 2'-O-methyladenosine
  modified_base 16: mod_base = OTHER; note = 2'-O-methyladenosine
  modified_base 17: mod_base = OTHER; note = 2'-O-methylcytidine
  modified_base 18: mod_base = OTHER; note = 2'-O-methyluridine
  modified_base 19: mod_base = OTHER; note = 2'-O-methyladenosine with phosphorothioate linkage
  modified_base 20: mod_base = OTHER; note = 2'-O-methylguanosine with phosphorothioate linkage
  modified_base 21: mod_base = OTHER; note = 2'-O-methyladenosine
taataaaccttaggaactaga

SEQ ID NO: 3099 - RNA, 21 nt, synthetic construct
  source 1..21: mol_type = other RNA
  modified_base 1: mod_base = OTHER; note = 2'-O-methyladenosine with phosphorothioate linkage
  modified_base 2: mod_base = OTHER; note = 2'-O-methyluridine with phosphorothioate linkage
  modified_base 3: mod_base = OTHER; note = 2'-O-methylguanosine
  modified_base 4: mod_base = OTHER; note = 2'-O-methyladenosine
  modified_base 5: mod_base = OTHER; note = 2'-O-methylcytidine
  modified_base 6: mod_base = OTHER; note = 2'-O-methylcytidine
  modified_base 7: mod_base = OTHER; note = 2'-fluorocytidine
  modified_base 8: mod_base = OTHER; note = 2'-O-methyladenosine
  modified_base 9: mod_base = OTHER; note = 2'-fluorouridine
  modified_base 10: mod_base = OTHER; note = 2'-fluorouridine
  modified_base 11: mod_base = OTHER; note = 2'-fluoroadenosine
  modified_base 12: mod_base = OTHER; note = 2'-O-methyluridine
  modified_base 13: mod_base = OTHER; note = 2'-O-methylguanosine
  modified_base 14: mod_base = OTHER; note = 2'-O-methyluridine
  modified_base 15: mod_base = OTHER; note = 2'-O-methylcytidine
  modified_base 16: mod_base = OTHER; note = 2'-O-methylcytidine
  modified_base 17: mod_base = OTHER; note = 2'-O-methyluridine
  modified_base 18: mod_base = OTHER; note = 2'-O-methyladenosine
  modified_base 19: mod_base = OTHER; note = 2'-O-methylguanosine with phosphorothioate linkage
  modified_base 20: mod_base = OTHER; note = 2'-O-methyluridine with phosphorothioate linkage
  modified_base 21: mod_base = OTHER; note = 2'-O-methyladenosine
atgacccattatgtcctagta

SEQ ID NO: 3100 - RNA, 21 nt, synthetic construct
  source 1..21: mol_type = other RNA
  modified_base 1: mod_base = OTHER; note = 2'-O-methyluridine with phosphorothioate linkage
  modified_base 2: mod_base = OTHER; note = 2'-O-methyladenosine with phosphorothioate linkage
  modified_base 3: mod_base = OTHER; note = 2'-O-methyluridine
  modified_base 4: mod_base = OTHER; note = 2'-O-methyladenosine
  modified_base 5: mod_base = OTHER; note = 2'-O-methylcytidine
  modified_base 6: mod_base = OTHER; note = 2'-O-methylcytidine
  modified_base 7: mod_base = OTHER; note = 2'-fluoroadenosine
  modified_base 8: mod_base = OTHER; note = 2'-O-methylguanosine
  modified_base 9: mod_base = OTHER; note = 2'-fluorouridine
  modified_base 10: mod_base = OTHER; note = 2'-fluoroadenosine
  modified_base 11: mod_base = OTHER; note = 2'-fluorouridine
  modified_base 12: mod_base = OTHER; note = 2'-O-methyladenosine
  modified_base 13: mod_base = OTHER; note = 2'-O-methyladenosine
  modified_base 14: mod_base = OTHER; note = 2'-O-methyladenosine
  modified_base 15: mod_base = OTHER; note = 2'-O-methyladenosine
  modified_base 16: mod_base = OTHER; note = 2'-O-methylguanosine
  modified_base 17: mod_base = OTHER; note = 2'-O-methylcytidine
  modified_base 18: mod_base = OTHER; note = 2'-O-methyluridine
  modified_base 19: mod_base = OTHER; note = 2'-O-methyladenosine with phosphorothioate linkage
  modified_base 20: mod_base = OTHER; note = 2'-O-methylcytidine with phosphorothioate linkage
  modified_base 21: mod_base = OTHER; note = 2'-O-methyladenosine
tataccagtataaaagctaca

SEQ ID NO: 3101 - RNA, 21 nt, synthetic construct
  source 1..21: mol_type = other RNA
  modified_base 1: mod_base = OTHER; note = 2'-O-methyladenosine with phosphorothioate linkage
  modified_base 2: mod_base = OTHER; note = 2'-O-methyladenosine with phosphorothioate linkage
  modified_base 3: mod_base = OTHER; note = 2'-O-methyladenosine
  modified_base 4: mod_base = OTHER; note = 2'-O-methylguanosine
  modified_base 5: mod_base = OTHER; note = 2'-O-methylcytidine
  modified_base 6: mod_base = OTHER; note = 2'-O-methylcytidine
  modified_base 7: mod_base = OTHER; note = 2'-fluorocytidine
  modified_base 8: mod_base = OTHER; note = 2'-O-methyluridine
  modified_base 9: mod_base = OTHER; note = 2'-fluoroguanosine
  modified_base 10: mod_base = OTHER; note = 2'-fluoroguanosine
  modified_base 11: mod_base = OTHER; note = 2'-fluoroadenosine
  modified_base 12: mod_base = OTHER; note = 2'-O-methyladenosine
  modified_base 13: mod_base = OTHER; note = 2'-O-methylcytidine
  modified_base 14: mod_base = OTHER; note = 2'-O-methylguanosine
  modified_base 15: mod_base = OTHER; note = 2'-O-methylcytidine
  modified_base 16: mod_base = OTHER; note = 2'-O-methyladenosine
  modified_base 17: mod_base = OTHER; note = 2'-O-methyladenosine
  modified_base 18: mod_base = OTHER; note = 2'-O-methyluridine
  modified_base 19: mod_base = OTHER; note = 2'-O-methyluridine with phosphorothioate linkage
  modified_base 20: mod_base = OTHER; note = 2'-O-methyladenosine with phosphorothioate linkage
  modified_base 21: mod_base = OTHER; note = 2'-O-methyladenosine
aaagccctggaacgcaattaa

SEQ ID NO: 3102 - RNA, 21 nt, synthetic construct
  source 1..21: mol_type = other RNA
  modified_base 1: mod_base = OTHER; note = 2'-O-methyladenosine with phosphorothioate linkage
  modified_base 2: mod_base = OTHER; note = 2'-O-methyladenosine with phosphorothioate linkage
  modified_base 3: mod_base = OTHER; note = 2'-O-methyluridine
  modified_base 4: mod_base = OTHER; note = 2'-O-methyluridine
  modified_base 5: mod_base = OTHER; note = 2'-O-methyladenosine
  modified_base 6: mod_base = OTHER; note = 2'-O-methyladenosine
  modified_base 7: mod_base = OTHER; note = 2'-fluoroadenosine
  modified_base 8: mod_base = OTHER; note = 2'-O-methyluridine
  modified_base 9: mod_base = OTHER; note = 2'-fluoroadenosine
  modified_base 10: mod_base = OTHER; note = 2'-fluorocytidine
  modified_base 11: mod_base = OTHER; note = 2'-fluoroadenosine
  modified_base 12: mod_base = OTHER; note = 2'-O-methylcytidine
  modified_base 13: mod_base = OTHER; note = 2'-O-methyluridine
  modified_base 14: mod_base = OTHER; note = 2'-O-methyladenosine
  modified_base 15: mod_base = OTHER; note = 2'-O-methylguanosine
  modified_base 16: mod_base = OTHER; note = 2'-O-methyluridine
  modified_base 17: mod_base = OTHER; note = 2'-O-methyladenosine
  modified_base 18: mod_base = OTHER; note = 2'-O-methyladenosine
  modified_base 19: mod_base = OTHER; note = 2'-O-methylguanosine with phosphorothioate linkage
  modified_base 20: mod_base = OTHER; note = 2'-O-methylguanosine with phosphorothioate linkage
  modified_base 21: mod_base = OTHER; note = 2'-O-methyladenosine
aattaaatacactagtaagga

SEQ ID NO: 3103 - RNA, 21 nt, synthetic construct
  source 1..21: mol_type = other RNA
  modified_base 1: mod_base = OTHER; note = 2'-O-methyladenosine with phosphorothioate linkage
  modified_base 2: mod_base = OTHER; note = 2'-O-methyluridine with phosphorothioate linkage
  modified_base 3: mod_base = OTHER; note = 2'-O-methyluridine
  modified_base 4: mod_base = OTHER; note = 2'-O-methyladenosine
  modified_base 5: mod_base = OTHER; note = 2'-O-methyladenosine
  modified_base 6: mod_base = OTHER; note = 2'-O-methyladenosine
  modified_base 7: mod_base = OTHER; note = 2'-fluorouridine
  modified_base 8: mod_base = OTHER; note = 2'-O-methyladenosine
  modified_base 9: mod_base = OTHER; note = 2'-fluorocytidine
  modified_base 10: mod_base = OTHER; note = 2'-fluoroadenosine
  modified_base 11: mod_base = OTHER; note = 2'-fluorocytidine
  modified_base 12: mod_base = OTHER; note = 2'-O-methyluridine
  modified_base 13: mod_base = OTHER; note = 2'-O-methyladenosine
  modified_base 14: mod_base = OTHER; note = 2'-O-methylguanosine
  modified_base 15: mod_base = OTHER; note = 2'-O-methyluridine
  modified_base 16: mod_base = OTHER; note = 2'-O-methyladenosine
  modified_base 17: mod_base = OTHER; note = 2'-O-methyladenosine
  modified_base 18: mod_base = OTHER; note = 2'-O-methylguanosine
  modified_base 19: mod_base = OTHER; note = 2'-O-methylguanosine with phosphorothioate linkage
  modified_base 20: mod_base = OTHER; note = 2'-O-methyladenosine with phosphorothioate linkage
  modified_base 21: mod_base = OTHER; note = 2'-O-methyladenosine
attaaatacactagtaaggaa

SEQ ID NO: 3104 - RNA, 21 nt, synthetic construct
  source 1..21: mol_type = other RNA
  modified_base 1: mod_base = OTHER; note = 2'-O-methyluridine with phosphorothioate linkage
  modified_base 2: mod_base = OTHER; note = 2'-O-methyladenosine with phosphorothioate linkage
  modified_base 3: mod_base = OTHER; note = 2'-O-methyluridine
  modified_base 4: mod_base = OTHER; note = 2'-O-methylguanosine
  modified_base 5: mod_base = OTHER; note = 2'-O-methyladenosine
  modified_base 6: mod_base = OTHER; note = 2'-O-methyluridine
  modified_base 7: mod_base = OTHER; note = 2'-fluorouridine
  modified_base 8: mod_base = OTHER; note = 2'-O-methyluridine
  modified_base 9: mod_base = OTHER; note = 2'-fluoroadenosine
  modified_base 10: mod_base = OTHER; note = 2'-fluorouridine
  modified_base 11: mod_base = OTHER; note = 2'-fluorouridine
  modified_base 12: mod_base = OTHER; note = 2'-O-methyladenosine
  modified_base 13: mod_base = OTHER; note = 2'-O-methylguanosine
  modified_base 14: mod_base = OTHER; note = 2'-O-methylcytidine
  modified_base 15: mod_base = OTHER; note = 2'-O-methyladenosine
  modified_base 16: mod_base = OTHER; note = 2'-O-methylcytidine
  modified_base 17: mod_base = OTHER; note = 2'-O-methyladenosine
  modified_base 18: mod_base = OTHER; note = 2'-O-methyladenosine
  modified_base 19: mod_base = OTHER; note = 2'-O-methylcytidine with phosphorothioate linkage
  modified_base 20: mod_base = OTHER; note = 2'-O-methylguanosine with phosphorothioate linkage
  modified_base 21: mod_base = OTHER; note = 2'-O-methyladenosine
tatgatttattagcacaacga

SEQ ID NO: 3105 - RNA, 21 nt, synthetic construct
  source 1..21: mol_type = other RNA
  modified_base 1: mod_base = OTHER; note = 2'-O-methyladenosine with phosphorothioate linkage
  modified_base 2: mod_base = OTHER; note = 2'-O-methyluridine with phosphorothioate linkage
  modified_base 3: mod_base = OTHER; note = 2'-O-methylguanosine
  modified_base 4: mod_base = OTHER; note = 2'-O-methyladenosine
  modified_base 5: mod_base = OTHER; note = 2'-O-methyluridine
  modified_base 6: mod_base = OTHER; note = 2'-O-methyluridine
  modified_base 7: mod_base = OTHER; note = 2'-fluorouridine
  modified_base 8: mod_base = OTHER; note = 2'-O-methyladenosine
  modified_base 9: mod_base = OTHER; note = 2'-fluorouridine
  modified_base 10: mod_base = OTHER; note = 2'-fluorouridine
  modified_base 11: mod_base = OTHER; note = 2'-fluoroadenosine
  modified_base 12: mod_base = OTHER; note = 2'-O-methylguanosine
  modified_base 13: mod_base = OTHER; note = 2'-O-methylcytidine
  modified_base 14: mod_base = OTHER; note = 2'-O-methyladenosine
  modified_base 15: mod_base = OTHER; note = 2'-O-methylcytidine
  modified_base 16: mod_base = OTHER; note = 2'-O-methyladenosine
  modified_base 17: mod_base = OTHER; note = 2'-O-methyladenosine
  modified_base 18: mod_base = OTHER; note = 2'-O-methylcytidine
  modified_base 19: mod_base = OTHER; note = 2'-O-methylguanosine with phosphorothioate linkage
  modified_base 20: mod_base = OTHER; note = 2'-O-methyluridine with phosphorothioate linkage
  modified_base 21: mod_base = OTHER; note = 2'-O-methyladenosine
atgatttattagcacaacgta

SEQ ID NO: 3106 - RNA, 21 nt, synthetic construct
  source 1..21: mol_type = other RNA
  modified_base 1: mod_base = OTHER; note = 2'-O-methylguanosine with phosphorothioate linkage
  modified_base 2: mod_base = OTHER; note = 2'-O-methyladenosine with phosphorothioate linkage
  modified_base 3: mod_base = OTHER; note = 2'-O-methyluridine
  modified_base 4: mod_base = OTHER; note = 2'-O-methyluridine
  modified_base 5: mod_base = OTHER; note = 2'-O-methyluridine
  modified_base 6: mod_base = OTHER; note = 2'-O-methyladenosine
  modified_base 7: mod_base = OTHER; note = 2'-fluorouridine
  modified_base 8: mod_base = OTHER; note = 2'-O-methyluridine
  modified_base 9: mod_base = OTHER; note = 2'-fluoroadenosine
  modified_base 10: mod_base = OTHER; note = 2'-fluoroguanosine
  modified_base 11: mod_base = OTHER; note = 2'-fluorocytidine
  modified_base 12: mod_base = OTHER; note = 2'-O-methyladenosine
  modified_base 13: mod_base = OTHER; note = 2'-O-methylcytidine
  modified_base 14: mod_base = OTHER; note = 2'-O-methyladenosine
  modified_base 15: mod_base = OTHER; note = 2'-O-methyladenosine
  modified_base 16: mod_base = OTHER; note = 2'-O-methylcytidine
  modified_base 17: mod_base = OTHER; note = 2'-O-methylguanosine
  modified_base 18: mod_base = OTHER; note = 2'-O-methyluridine
  modified_base 19: mod_base = OTHER; note = 2'-O-methylguanosine with phosphorothioate linkage
  modified_base 20: mod_base = OTHER; note = 2'-O-methylguanosine with phosphorothioate linkage
  modified_base 21: mod_base = OTHER; note = 2'-O-methyladenosine
gatttattagcacaacgtgga

SEQ ID NO: 3107 - RNA, 21 nt, synthetic construct
  source 1..21: mol_type = other RNA
  modified_base 1: mod_base = OTHER; note = 2'-O-methyladenosine with phosphorothioate linkage
  modified_base 2: mod_base = OTHER; note = 2'-O-methyluridine with phosphorothioate linkage
  modified_base 3: mod_base = OTHER; note = 2'-O-methyluridine
  modified_base 4: mod_base = OTHER; note = 2'-O-methyluridine
  modified_base 5: mod_base = OTHER; note = 2'-O-methyladenosine
  modified_base 6: mod_base = OTHER; note = 2'-O-methyluridine
  modified_base 7: mod_base = OTHER; note = 2'-fluorouridine
  modified_base 8: mod_base = OTHER; note = 2'-O-methyladenosine
  modified_base 9: mod_base = OTHER; note = 2'-fluoroguanosine
  modified_base 10: mod_base = OTHER; note = 2'-fluorocytidine
  modified_base 11: mod_base = OTHER; note = 2'-fluoroadenosine
  modified_base 12: mod_base = OTHER; note = 2'-O-methylcytidine
  modified_base 13: mod_base = OTHER; note = 2'-O-methyladenosine
  modified_base 14: mod_base = OTHER; note = 2'-O-methyladenosine
  modified_base 15: mod_base = OTHER; note = 2'-O-methylcytidine
  modified_base 16: mod_base = OTHER; note = 2'-O-methylguanosine
  modified_base 17: mod_base = OTHER; note = 2'-O-methyluridine
  modified_base 18: mod_base = OTHER; note = 2'-O-methylguanosine
  modified_base 19: mod_base = OTHER; note = 2'-O-methylguanosine with phosphorothioate linkage
  modified_base 20: mod_base = OTHER; note = 2'-O-methyluridine with phosphorothioate linkage
  modified_base 21: mod_base = OTHER; note = 2'-O-methyladenosine
atttattagcacaacgtggta

SEQ ID NO: 3108 - RNA, 21 nt, synthetic construct
  source 1..21: mol_type = other RNA
  modified_base 1: mod_base = OTHER; note = 2'-O-methyluridine with phosphorothioate linkage
  modified_base 2: mod_base = OTHER; note = 2'-O-methyluridine with phosphorothioate linkage
  modified_base 3: mod_base = OTHER; note = 2'-O-methyladenosine
  modified_base 4: mod_base = OTHER; note = 2'-O-methyluridine
  modified_base 5: mod_base = OTHER; note = 2'-O-methyluridine
  modified_base 6: mod_base = OTHER; note = 2'-O-methyladenosine
  modified_base 7: mod_base = OTHER; note = 2'-fluoroguanosine
  modified_base 8: mod_base = OTHER; note = 2'-O-methylcytidine
  modified_base 9: mod_base = OTHER; note = 2'-fluoroadenosine
  modified_base 10: mod_base = OTHER; note = 2'-fluorocytidine
  modified_base 11: mod_base = OTHER; note = 2'-fluoroadenosine
  modified_base 12: mod_base = OTHER; note = 2'-O-methyladenosine
  modified_base 13: mod_base = OTHER; note = 2'-O-methylcytidine
  modified_base 14: mod_base = OTHER; note = 2'-O-methylguanosine
  modified_base 15: mod_base = OTHER; note = 2'-O-methyluridine
  modified_base 16: mod_base = OTHER; note = 2'-O-methylguanosine
  modified_base 17: mod_base = OTHER; note = 2'-O-methylguanosine
  modified_base 18: mod_base = OTHER; note = 2'-O-methyluridine
  modified_base 19: mod_base = OTHER; note = 2'-O-methyladenosine with phosphorothioate linkage
  modified_base 20: mod_base = OTHER; note = 2'-O-methylcytidine with phosphorothioate linkage
  modified_base 21: mod_base = OTHER; note = 2'-O-methyladenosine
ttattagcacaacgtggtaca

SEQ ID NO: 3109 - RNA, 21 nt, synthetic construct
  source 1..21: mol_type = other RNA
  modified_base 1: mod_base = OTHER; note = 2'-O-methyluridine with phosphorothioate linkage
  modified_base 2: mod_base = OTHER; note = 2'-O-methyladenosine with phosphorothioate linkage
  modified_base 3: mod_base = OTHER; note = 2'-O-methylguanosine
  modified_base 4: mod_base = OTHER; note = 2'-O-methylcytidine
  modified_base 5: mod_base = OTHER; note = 2'-O-methyladenosine
  modified_base 6: mod_base = OTHER; note = 2'-O-methylcytidine
  modified_base 7: mod_base = OTHER; note = 2'-fluoroadenosine
  modified_base 8: mod_base = OTHER; note = 2'-O-methyladenosine
  modified_base 9: mod_base = OTHER; note = 2'-fluorocytidine
  modified_base 10: mod_base = OTHER; note = 2'-fluoroguanosine
  modified_base 11: mod_base = OTHER; note = 2'-fluorouridine
  modified_base 12: mod_base = OTHER; note = 2'-O-methylguanosine
  modified_base 13: mod_base = OTHER; note = 2'-O-methylguanosine
  modified_base 14: mod_base = OTHER; note = 2'-O-methyluridine
  modified_base 15: mod_base = OTHER; note = 2'-O-methyladenosine
  modified_base 16: mod_base = OTHER; note = 2'-O-methylcytidine
  modified_base 17: mod_base = OTHER; note = 2'-O-methyluridine
  modified_base 18: mod_base = OTHER; note = 2'-O-methyladenosine
  modified_base 19: mod_base = OTHER; note = 2'-O-methyluridine with phosphorothioate linkage
  modified_base 20: mod_base = OTHER; note = 2'-O-methyluridine with phosphorothioate linkage
  modified_base 21: mod_base = OTHER; note = 2'-O-methyladenosine
tagcacaacgtggtactatta

SEQ ID NO: 3110 - RNA, 21 nt, synthetic construct
  source 1..21: mol_type = other RNA
  modified_base 1: mod_base = OTHER; note = 2'-O-methyluridine with phosphorothioate linkage
  modified_base 2: mod_base = OTHER; note = 2'-O-methyluridine with phosphorothioate linkage
  modified_base 3: mod_base = OTHER; note = 2'-O-methyluridine
  modified_base 4: mod_base = OTHER; note = 2'-O-methyluridine
  modified_base 5: mod_base = OTHER; note = 2'-O-methyluridine
  modified_base 6: mod_base = OTHER; note = 2'-O-methyluridine
  modified_base 7: mod_base = OTHER; note = 2'-fluoroadenosine
  modified_base 8: mod_base = OTHER; note = 2'-O-methyluridine
  modified_base 9: mod_base = OTHER; note = 2'-fluorouridine
  modified_base 10: mod_base = OTHER; note = 2'-fluoroadenosine
  modified_base 11: mod_base = OTHER; note = 2'-fluoroadenosine
  modified_base 12: mod_base = OTHER; note = 2'-O-methylguanosine
  modified_base 13: mod_base = OTHER; note = 2'-O-methylcytidine
  modified_base 14: mod_base = OTHER; note = 2'-O-methyluridine
  modified_base 15: mod_base = OTHER; note = 2'-O-methyladenosine
  modified_base 16: mod_base = OTHER; note = 2'-O-methylguanosine
  modified_base 17: mod_base = OTHER; note = 2'-O-methylcytidine
  modified_base 18: mod_base = OTHER; note = 2'-O-methyladenosine
  modified_base 19: mod_base = OTHER; note = 2'-O-methyluridine with phosphorothioate linkage
  modified_base 20: mod_base = OTHER; note = 2'-O-methylcytidine with phosphorothioate linkage
  modified_base 21: mod_base = OTHER; note = 2'-O-methyladenosine
ttttttattaagctagcatca

SEQ ID NO: 3111 - RNA, 21 nt, synthetic construct
  source 1..21: mol_type = other RNA
  modified_base 1: mod_base = OTHER; note = 2'-O-methyluridine with phosphorothioate linkage
  modified_base 2: mod_base = OTHER; note = 2'-O-methyluridine with phosphorothioate linkage
  modified_base 3: mod_base = OTHER; note = 2'-O-methyluridine
  modified_base 4: mod_base = OTHER; note = 2'-O-methyladenosine
  modified_base 5: mod_base = OTHER; note = 2'-O-methyluridine
  modified_base 6: mod_base = OTHER; note = 2'-O-methyluridine
  modified_base 7: mod_base = OTHER; note = 2'-fluoroadenosine
  modified_base 8: mod_base = OTHER; note = 2'-O-methyladenosine
  modified_base 9: mod_base = OTHER; note = 2'-fluoroguanosine
  modified_base 10: mod_base = OTHER; note = 2'-fluorocytidine
  modified_base 11: mod_base = OTHER; note = 2'-fluorouridine
  modified_base 12: mod_base = OTHER; note = 2'-O-methyladenosine
  modified_base 13: mod_base = OTHER; note = 2'-O-methylguanosine
  modified_base 14: mod_base = OTHER; note = 2'-O-methylcytidine
  modified_base 15: mod_base = OTHER; note = 2'-O-methyladenosine
  modified_base 16: mod_base = OTHER; note = 2'-O-methyluridine
  modified_base 17: mod_base = OTHER; note = 2'-O-methylcytidine
  modified_base 18: mod_base = OTHER; note = 2'-O-methyluridine
  modified_base 19: mod_base = OTHER; note = 2'-O-methylguanosine with phosphorothioate linkage
  modified_base 20: mod_base = OTHER; note = 2'-O-methylcytidine with phosphorothioate linkage
  modified_base 21: mod_base = OTHER; note = 2'-O-methyladenosine
tttattaagctagcatctgca

SEQ ID NO: 3112 - RNA, 21 nt, synthetic construct
  source 1..21: mol_type = other RNA
  modified_base 1: mod_base = OTHER; note = 2'-O-methyluridine with phosphorothioate linkage
  modified_base 2: mod_base = OTHER; note = 2'-O-methyluridine with phosphorothioate linkage
  modified_base 3: mod_base = OTHER; note = 2'-O-methyluridine
  modified_base 4: mod_base = OTHER; note = 2'-O-methyluridine
  modified_base 5: mod_base = OTHER; note = 2'-O-methylcytidine
  modified_base 6: mod_base = OTHER; note = 2'-O-methyluridine
  modified_base 7: mod_base = OTHER; note = 2'-fluorocytidine
  modified_base 8: mod_base = OTHER; note = 2'-O-methyluridine
  modified_base 9: mod_base = OTHER; note = 2'-fluoroadenosine
  modified_base 10: mod_base = OTHER; note = 2'-fluoroadenosine
  modified_base 11: mod_base = OTHER; note = 2'-fluorouridine
  modified_base 12: mod_base = OTHER; note = 2'-O-methylcytidine
  modified_base 13: mod_base = OTHER; note = 2'-O-methyladenosine
  modified_base 14: mod_base = OTHER; note = 2'-O-methylguanosine
  modified_base 15: mod_base = OTHER; note = 2'-O-methyladenosine
  modified_base 16: mod_base = OTHER; note = 2'-O-methylguanosine
  modified_base 17: mod_base = OTHER; note = 2'-O-methyladenosine
  modified_base 18: mod_base = OTHER; note = 2'-O-methyluridine
  modified_base 19: mod_base = OTHER; note = 2'-O-methyladenosine with phosphorothioate linkage
  modified_base 20: mod_base = OTHER; note = 2'-O-methylcytidine with phosphorothioate linkage
  modified_base 21: mod_base = OTHER; note = 2'-O-methyladenosine
ttttctctaatcagagataca

SEQ ID NO: 3113 - RNA, 21 nt, synthetic construct
  source 1..21: mol_type = other RNA
  modified_base 1: mod_base = OTHER; note = 2'-O-methylguanosine with phosphorothioate linkage
  modified_base 2: mod_base = OTHER; note = 2'-O-methyladenosine with phosphorothioate linkage
  modified_base 3: mod_base = OTHER; note = 2'-O-methyluridine
  modified_base 4: mod_base = OTHER; note = 2'-O-methyladenosine
  modified_base 5: mod_base = OTHER; note = 2'-O-methylcytidine
  modified_base 6: mod_base = OTHER; note = 2'-O-methyladenosine
  modified_base 7: mod_base = OTHER; note = 2'-fluoroguanosine
  modified_base 8: mod_base = OTHER; note = 2'-O-methyladenosine
  modified_base 9: mod_base = OTHER; note = 2'-fluoroguanosine
  modified_base 10: mod_base = OTHER; note = 2'-fluoroguanosine
  modified_base 11: mod_base = OTHER; note = 2'-fluorouridine
  modified_base 12: mod_base = OTHER; note = 2'-O-methyluridine
  modified_base 13: mod_base = OTHER; note = 2'-O-methylguanosine
  modified_base 14: mod_base = OTHER; note = 2'-O-methyladenosine
  modified_base 15: mod_base = OTHER; note = 2'-O-methylguanosine
  modified_base 16: mod_base = OTHER; note = 2'-O-methyluridine
  modified_base 17: mod_base = OTHER; note = 2'-O-methyladenosine
  modified_base 18: mod_base = OTHER; note = 2'-O-methyluridine
  modified_base 19: mod_base = OTHER; note = 2'-O-methyladenosine with phosphorothioate linkage
  modified_base 20: mod_base = OTHER; note = 2'-O-methyladenosine with phosphorothioate linkage
  modified_base 21: mod_base = OTHER; note = 2'-O-methyladenosine
gatacagaggttgagtataaa

SEQ ID NO: 3114 - RNA, 21 nt, synthetic construct
  source 1..21: mol_type = other RNA
  modified_base 1: mod_base = OTHER; note = 2'-O-methylcytidine with phosphorothioate linkage
  modified_base 2: mod_base = OTHER; note = 2'-O-methyladenosine with phosphorothioate linkage
  modified_base 3: mod_base = OTHER; note = 2'-O-methylguanosine
  modified_base 4: mod_base = OTHER; note = 2'-O-methyladenosine
  modified_base 5: mod_base = OTHER; note = 2'-O-methyluridine
  modified_base 6: mod_base = OTHER; note = 2'-O-methyladenosine
  modified_base 7: mod_base = OTHER; note = 2'-fluoroguanosine
  modified_base 8: mod_base = OTHER; note = 2'-O-methylguanosine
  modified_base 9: mod_base = OTHER; note = 2'-fluoroadenosine
  modified_base 10: mod_base = OTHER; note = 2'-fluorocytidine
  modified_base 11: mod_base = OTHER; note = 2'-fluoroadenosine
  modified_base 12: mod_base = OTHER; note = 2'-O-methyladenosine
  modified_base 13: mod_base = OTHER; note = 2'-O-methyluridine
  modified_base 14: mod_base = OTHER; note = 2'-O-methyluridine
  modified_base 15: mod_base = OTHER; note = 2'-O-methyladenosine
  modified_base 16: mod_base = OTHER; note = 2'-O-methyladenosine
  modified_base 17: mod_base = OTHER; note = 2'-O-methylguanosine
  modified_base 18: mod_base = OTHER; note = 2'-O-methyluridine
  modified_base 19: mod_base = OTHER; note = 2'-O-methylguanosine with phosphorothioate linkage
  modified_base 20: mod_base = OTHER; note = 2'-O-methylcytidine with phosphorothioate linkage
  modified_base 21: mod_base = OTHER; note = 2'-O-methyladenosine
cagataggacaattaagtgca

SEQ ID NO: 3115 - RNA, 21 nt, synthetic construct
  source 1..21: mol_type = other RNA
  modified_base 1: mod_base = OTHER; note = 2'-O-methylguanosine with phosphorothioate linkage
  modified_base 2: mod_base = OTHER; note = 2'-O-methyladenosine with phosphorothioate linkage
  modified_base 3: mod_base = OTHER; note = 2'-O-methyluridine
  modified_base 4: mod_base = OTHER; note = 2'-O-methyladenosine
  modified_base 5: mod_base = OTHER; note = 2'-O-methylguanosine
  modified_base 6: mod_base = OTHER; note = 2'-O-methylguanosine
  modified_base 7: mod_base = OTHER; note = 2'-fluoroadenosine
  modified_base 8: mod_base = OTHER; note = 2'-O-methylcytidine
  modified_base 9: mod_base = OTHER; note = 2'-fluoroadenosine
  modified_base 10: mod_base = OTHER; note = 2'-fluoroadenosine
  modified_base 11: mod_base = OTHER; note = 2'-fluorouridine
  modified_base 12: mod_base = OTHER; note = 2'-O-methyluridine
  modified_base 13: mod_base = OTHER; note = 2'-O-methyladenosine
  modified_base 14: mod_base = OTHER; note = 2'-O-methyladenosine
  modified_base 15: mod_base = OTHER; note = 2'-O-methylguanosine
  modified_base 16: mod_base = OTHER; note = 2'-O-methyluridine
  modified_base 17: mod_base = OTHER; note = 2'-O-methylguanosine
  modified_base 18: mod_base = OTHER; note = 2'-O-methylcytidine
  modified_base 19: mod_base = OTHER; note = 2'-O-methyladenosine with phosphorothioate linkage
  modified_base 20: mod_base = OTHER; note = 2'-O-methylcytidine with phosphorothioate linkage
  modified_base 21: mod_base = OTHER; note = 2'-O-methyladenosine
gataggacaattaagtgcaca

SEQ ID NO: 3116 - RNA, 21 nt, synthetic construct
  source 1..21: mol_type = other RNA
  modified_base 1: mod_base = OTHER; note = 2'-O-methylcytidine with phosphorothioate linkage
  modified_base 2: mod_base = OTHER; note = 2'-O-methylcytidine with phosphorothioate linkage
  modified_base 3: mod_base = OTHER; note = 2'-O-methylcytidine
  modified_base 4: mod_base = OTHER; note = 2'-O-methyladenosine
  modified_base 5: mod_base = OTHER; note = 2'-O-methylguanosine
  modified_base 6: mod_base = OTHER; note = 2'-O-methyluridine
  modified_base 7: mod_base = OTHER; note = 2'-fluorouridine
  modified_base 8: mod_base = OTHER; note = 2'-O-methyluridine
  modified_base 9: mod_base = OTHER; note = 2'-fluoroadenosine
  modified_base 10: mod_base = OTHER; note = 2'-fluorocytidine
  modified_base 11: mod_base = OTHER; note = 2'-fluoroadenosine
  modified_base 12: mod_base = OTHER; note = 2'-O-methylguanosine
  modified_base 13: mod_base = OTHER; note = 2'-O-methylguanosine
  modified_base 14: mod_base = OTHER; note = 2'-O-methyluridine
  modified_base 15: mod_base = OTHER; note = 2'-O-methylcytidine
  modified_base 16: mod_base = OTHER; note = 2'-O-methyluridine
  modified_base 17: mod_base = OTHER; note = 2'-O-methyladenosine
  modified_base 18: mod_base = OTHER; note = 2'-O-methyluridine
  modified_base 19: mod_base = OTHER; note = 2'-O-methyladenosine with phosphorothioate linkage
  modified_base 20: mod_base = OTHER; note = 2'-O-methylcytidine with phosphorothioate linkage
  modified_base 21: mod_base = OTHER; note = 2'-O-methyladenosine
cccagtttacaggtctataca

SEQ ID NO: 3117 - RNA, 21 nt, synthetic construct
  source 1..21: mol_type = other RNA
  modified_base 1: mod_base = OTHER; note = 2'-O-methyluridine with phosphorothioate linkage
  modified_base 2: mod_base = OTHER; note = 2'-O-methyluridine with phosphorothioate linkage
  modified_base 3: mod_base = OTHER; note = 2'-O-methylguanosine
  modified_base 4: mod_base = OTHER; note = 2'-O-methyladenosine
  modified_base 5: mod_base = OTHER; note = 2'-O-methylguanosine
  modified_base 6: mod_base = OTHER; note = 2'-O-methylcytidine
  modified_base 7: mod_base = OTHER; note = 2'-fluorouridine
  modified_base 8: mod_base = OTHER; note = 2'-O-methyluridine
  modified_base 9: mod_base = OTHER; note = 2'-fluoroadenosine
  modified_base 10: mod_base = OTHER; note = 2'-fluorocytidine
  modified_base 11: mod_base = OTHER; note = 2'-fluorouridine
  modified_base 12: mod_base = OTHER; note = 2'-O-methyluridine
  modified_base 13: mod_base = OTHER; note = 2'-O-methyladenosine
  modified_base 14: mod_base = OTHER; note = 2'-O-methylcytidine
  modified_base 15: mod_base = OTHER; note = 2'-O-methyluridine
  modified_base 16: mod_base = OTHER; note = 2'-O-methyluridine
  modified_base 17: mod_base = OTHER; note = 2'-O-methylguanosine
  modified_base 18: mod_base = OTHER; note = 2'-O-methylguanosine
  modified_base 19: mod_base = OTHER; note = 2'-O-methyladenosine with phosphorothioate linkage
  modified_base 20: mod_base = OTHER; note = 2'-O-methylcytidine with phosphorothioate linkage
  modified_base 21: mod_base = OTHER; note = 2'-O-methyladenosine
ttgagcttacttacttggaca

SEQ ID NO: 3118 - RNA, 21 nt, synthetic construct
  source 1..21: mol_type = other RNA
  modified_base 1: mod_base = OTHER; note = 2'-O-methyladenosine with phosphorothioate linkage
  modified_base 2: mod_base = OTHER; note = 2'-O-methylguanosine with phosphorothioate linkage
  modified_base 3: mod_base = OTHER; note = 2'-O-methylcytidine
  modified_base 4: mod_base = OTHER; note = 2'-O-methyluridine
  modified_base 5: mod_base = OTHER; note = 2'-O-methyluridine
  modified_base 6: mod_base = OTHER; note = 2'-O-methyladenosine
  modified_base 7: mod_base = OTHER; note = 2'-fluorocytidine
  modified_base 8: mod_base = OTHER; note = 2'-O-methyluridine
  modified_base 9: mod_base = OTHER; note = 2'-fluorouridine
  modified_base 10: mod_base = OTHER; note = 2'-fluoroadenosine
  modified_base 11: mod_base = OTHER; note = 2'-fluorocytidine
  modified_base 12: mod_base = OTHER; note = 2'-O-methyluridine
  modified_base 13: mod_base = OTHER; note = 2'-O-methyluridine
  modified_base 14: mod_base = OTHER; note = 2'-O-methylguanosine
  modified_base 15: mod_base = OTHER; note = 2'-O-methylguanosine
  modified_base 16: mod_base = OTHER; note = 2'-O-methyladenosine
  modified_base 17: mod_base = OTHER; note = 2'-O-methylcytidine
  modified_base 18: mod_base = OTHER; note = 2'-O-methylguanosine
  modified_base 19: mod_base = OTHER; note = 2'-O-methylcytidine with phosphorothioate linkage
  modified_base 20: mod_base = OTHER; note = 2'-O-methyladenosine with phosphorothioate linkage
  modified_base 21: mod_base = OTHER; note = 2'-O-methyladenosine
agcttacttacttggacgcaa

SEQ ID NO: 3119 - RNA, 21 nt, synthetic construct
  source 1..21: mol_type = other RNA
  modified_base 1: mod_base = OTHER; note = 2'-O-methyluridine with phosphorothioate linkage
  modified_base 2: mod_base = OTHER; note = 2'-O-methylguanosine with phosphorothioate linkage
  modified_base 3: mod_base = OTHER; note = 2'-O-methylguanosine
  modified_base 4: mod_base = OTHER; note = 2'-O-methyladenosine
  modified_base 5: mod_base = OTHER; note = 2'-O-methylcytidine
  modified_base 6: mod_base = OTHER; note = 2'-O-methylguanosine
  modified_base 7: mod_base = OTHER; note = 2'-fluorocytidine
  modified_base 8: mod_base = OTHER; note = 2'-O-methyladenosine
  modified_base 9: mod_base = OTHER; note = 2'-fluoroadenosine
  modified_base 10: mod_base = OTHER; note = 2'-fluorocytidine
  modified_base 11: mod_base = OTHER; note = 2'-fluoroadenosine
  modified_base 12: mod_base = OTHER; note = 2'-O-methyluridine
  modified_base 13: mod_base = OTHER; note = 2'-O-methyluridine
  modified_base 14: mod_base = OTHER; note = 2'-O-methylguanosine
  modified_base 15: mod_base = OTHER; note = 2'-O-methylcytidine
  modified_base 16: mod_base = OTHER; note = 2'-O-methyladenosine
  modified_base 17: mod_base = OTHER; note = 2'-O-methyladenosine
  modified_base 18: mod_base = OTHER; note = 2'-O-methylguanosine
  modified_base 19: mod_base = OTHER; note = 2'-O-methylcytidine with phosphorothioate linkage
  modified_base 20: mod_base = OTHER; note = 2'-O-methylguanosine with phosphorothioate linkage
  modified_base 21: mod_base = OTHER; note = 2'-O-methyladenosine
tggacgcaacattgcaagcga

SEQ ID NO: 3120 - RNA, 21 nt, synthetic construct
  source 1..21: mol_type = other RNA
  modified_base 1: mod_base = OTHER; note = 2'-O-methylguanosine with phosphorothioate linkage
  modified_base 2: mod_base = OTHER; note = 2'-O-methylguanosine with phosphorothioate linkage
  modified_base 3: mod_base = OTHER; note = 2'-O-methyladenosine
  modified_base 4: mod_base = OTHER; note = 2'-O-methylcytidine
  modified_base 5: mod_base = OTHER; note = 2'-O-methylguanosine
  modified_base 6: mod_base = OTHER; note = 2'-O-methylcytidine
  modified_base 7: mod_base = OTHER; note = 2'-fluoroadenosine
  modified_base 8: mod_base = OTHER; note = 2'-O-methyladenosine
  modified_base 9: mod_base = OTHER; note = 2'-fluorocytidine
  modified_base 10: mod_base = OTHER; note = 2'-fluoroadenosine
  modified_base 11: mod_base = OTHER; note = 2'-fluorouridine
  modified_base 12: mod_base = OTHER; note = 2'-O-methyluridine
  modified_base 13: mod_base = OTHER; note = 2'-O-methylguanosine
  modified_base 14: mod_base = OTHER; note = 2'-O-methylcytidine
  modified_base 15: mod_base = OTHER; note = 2'-O-methyladenosine
  modified_base 16: mod_base = OTHER; note = 2'-O-methyladenosine
  modified_base 17: mod_base = OTHER; note = 2'-O-methylguanosine
  modified_base 18: mod_base = OTHER; note = 2'-O-methylcytidine
  modified_base 19: mod_base = OTHER; note = 2'-O-methylguanosine with phosphorothioate linkage
  modified_base 20: mod_base = OTHER; note = 2'-O-methylcytidine with phosphorothioate linkage
  modified_base 21: mod_base = OTHER; note = 2'-O-methyladenosine
ggacgcaacattgcaagcgca

SEQ ID NO: 3121 - RNA, 21 nt, synthetic construct
  source 1..21: mol_type = other RNA
  modified_base 1: mod_base = OTHER; note = 2'-O-methylguanosine with phosphorothioate linkage
  modified_base 2: mod_base = OTHER; note = 2'-O-methyladenosine with phosphorothioate linkage
  modified_base 3: mod_base = OTHER; note = 2'-O-methylcytidine
  modified_base 4: mod_base = OTHER; note = 2'-O-methylguanosine
  modified_base 5: mod_base = OTHER; note = 2'-O-methylcytidine
  modified_base 6: mod_base = OTHER; note = 2'-O-methyladenosine
  modified_base 7: mod_base = OTHER; note = 2'-fluoroadenosine
  modified_base 8: mod_base = OTHER; note = 2'-O-methylcytidine
  modified_base 9: mod_base = OTHER; note = 2'-fluoroadenosine
  modified_base 10: mod_base = OTHER; note = 2'-fluorouridine
  modified_base 11: mod_base = OTHER; note = 2'-fluorouridine
  modified_base 12: mod_base = OTHER; note = 2'-O-methylguanosine
  modified_base 13: mod_base = OTHER; note = 2'-O-methylcytidine
  modified_base 14: mod_base = OTHER; note = 2'-O-methyladenosine
  modified_base 15: mod_base = OTHER; note = 2'-O-methyladenosine
  modified_base 16: mod_base = OTHER; note = 2'-O-methylguanosine
  modified_base 17: mod_base = OTHER; note = 2'-O-methylcytidine
  modified_base 18: mod_base = OTHER; note = 2'-O-methylguanosine
  modified_base 19: mod_base = OTHER; note = 2'-O-methylcytidine with phosphorothioate linkage
  modified_base 20: mod_base = OTHER; note = 2'-O-methyluridine with phosphorothioate linkage
  modified_base 21: mod_base = OTHER; note = 2'-O-methyladenosine
gacgcaacattgcaagcgcta

SEQ ID NO: 3122 - RNA, 21 nt, synthetic construct
  source 1..21: mol_type = other RNA
  modified_base 1: mod_base = OTHER; note = 2'-O-methylguanosine with phosphorothioate linkage
  modified_base 2: mod_base = OTHER; note = 2'-O-methylcytidine with phosphorothioate linkage
  modified_base 3: mod_base = OTHER; note = 2'-O-methyladenosine
  modified_base 4: mod_base = OTHER; note = 2'-O-methyladenosine
  modified_base 5: mod_base = OTHER; note = 2'-O-methylcytidine
  modified_base 6: mod_base = OTHER; note = 2'-O-methyladenosine
  modified_base 7: mod_base = OTHER; note = 2'-fluorouridine
  modified_base 8: mod_base = OTHER; note = 2'-O-methyluridine
  modified_base 9: mod_base = OTHER; note = 2'-fluoroguanosine
  modified_base 10: mod_base = OTHER; note = 2'-fluorocytidine
  modified_base 11: mod_base = OTHER; note = 2'-fluoroadenosine
  modified_base 12: mod_base = OTHER; note = 2'-O-methyladenosine
  modified_base 13: mod_base = OTHER; note = 2'-O-methylguanosine
  modified_base 14: mod_base = OTHER; note = 2'-O-methylcytidine
  modified_base 15: mod_base = OTHER; note = 2'-O-methylguanosine
  modified_base 16: mod_base = OTHER; note = 2'-O-methylcytidine
  modified_base 17: mod_base = OTHER; note = 2'-O-methyluridine
  modified_base 18: mod_base = OTHER; note = 2'-O-methylguanosine
  modified_base 19: mod_base = OTHER; note = 2'-O-methyluridine with phosphorothioate linkage
  modified_base 20: mod_base = OTHER; note = 2'-O-methylguanosine with phosphorothioate linkage
  modified_base 21: mod_base = OTHER; note = 2'-O-methyladenosine
gcaacattgcaagcgctgtga

SEQ ID NO: 3123 - RNA, 21 nt, synthetic construct
  source 1..21: mol_type = other RNA
  modified_base 1: mod_base = OTHER; note = 2'-O-methyladenosine with phosphorothioate linkage
  modified_base 2: mod_base = OTHER; note = 2'-O-methyladenosine with phosphorothioate linkage
  modified_base 3: mod_base = OTHER; note = 2'-O-methyladenosine
  modified_base 4: mod_base = OTHER; note = 2'-O-methyluridine
  modified_base 5: mod_base = OTHER; note = 2'-O-methylguanosine
  modified_base 6: mod_base = OTHER; note = 2'-O-methyladenosine
  modified_base 7: mod_base = OTHER; note = 2'-fluoroadenosine
  modified_base 8: mod_base = OTHER; note = 2'-O-methyluridine
  modified_base 9: mod_base = OTHER; note = 2'-fluoroguanosine
  modified_base 10: mod_base = OTHER; note = 2'-fluoroadenosine
  modified_base 11: mod_base = OTHER; note = 2'-fluorouridine
  modified_base 12: mod_base = OTHER; note = 2'-O-methyluridine
  modified_base 13: mod_base = OTHER; note = 2'-O-methylguanosine
  modified_base 14: mod_base = OTHER; note = 2'-O-methylcytidine
  modified_base 15: mod_base = OTHER; note = 2'-O-methyluridine
  modified_base 16: mod_base = OTHER; note = 2'-O-methyluridine
  modified_base 17: mod_base = OTHER; note = 2'-O-methyluridine
  modified_base 18: mod_base = OTHER; note = 2'-O-methylcytidine
  modified_base 19: mod_base = OTHER; note = 2'-O-methylguanosine with phosphorothioate linkage
  modified_base 20: mod_base = OTHER; note = 2'-O-methylcytidine with phosphorothioate linkage
  modified_base 21: mod_base = OTHER; note = 2'-O-methyladenosine
aaatgaatgattgctttcgca

SEQ ID NO: 3124 - RNA, 21 nt, synthetic construct
  source 1..21: mol_type = other RNA
  modified_base 1: mod_base = OTHER; note = 2'-O-methyladenosine with phosphorothioate linkage
  modified_base 2: mod_base = OTHER; note = 2'-O-methyladenosine with phosphorothioate linkage
  modified_base 3: mod_base = OTHER; note = 2'-O-methyluridine
  modified_base 4: mod_base = OTHER; note = 2'-O-methylguanosine
  modified_base 5: mod_base = OTHER; note = 2'-O-methyladenosine
  modified_base 6: mod_base = OTHER; note = 2'-O-methyladenosine
  modified_base 7: mod_base = OTHER; note = 2'-fluorouridine
  modified_base 8: mod_base = OTHER; note = 2'-O-methylguanosine
  modified_base 9: mod_base = OTHER; note = 2'-fluoroadenosine
  modified_base 10: mod_base = OTHER; note = 2'-fluorouridine
  modified_base 11: mod_base = OTHER; note = 2'-fluorouridine
  modified_base 12: mod_base = OTHER; note = 2'-O-methylguanosine
  modified_base 13: mod_base = OTHER; note = 2'-O-methylcytidine
  modified_base 14: mod_base = OTHER; note = 2'-O-methyluridine
  modified_base 15: mod_base = OTHER; note = 2'-O-methyluridine
  modified_base 16: mod_base = OTHER; note = 2'-O-methyluridine
  modified_base 17: mod_base = OTHER; note = 2'-O-methylcytidine
  modified_base 18: mod_base = OTHER; note = 2'-O-methylguanosine
  modified_base 19: mod_base = OTHER; note = 2'-O-methylcytidine with phosphorothioate linkage
  modified_base 20: mod_base = OTHER; note = 2'-O-methyluridine with phosphorothioate linkage
  modified_base 21: mod_base = OTHER; note = 2'-O-methyladenosine
aatgaatgattgctttcgcta

SEQ ID NO: 3125 - RNA, 21 nt, synthetic construct
  source 1..21: mol_type = other RNA
  modified_base 1: mod_base = OTHER; note = 2'-O-methyladenosine with phosphorothioate linkage
  modified_base 2: mod_base = OTHER; note = 2'-O-methyladenosine with phosphorothioate linkage
  modified_base 3: mod_base = OTHER; note = 2'-O-methyluridine
  modified_base 4: mod_base = OTHER; note = 2'-O-methylguanosine
  modified_base 5: mod_base = OTHER; note = 2'-O-methyladenosine
  modified_base 6: mod_base = OTHER; note = 2'-O-methyluridine
  modified_base 7: mod_base = OTHER; note = 2'-fluorouridine
  modified_base 8: mod_base = OTHER; note = 2'-O-methylguanosine
  modified_base 9: mod_base = OTHER; note = 2'-fluorocytidine
  modified_base 10: mod_base = OTHER; note = 2'-fluorouridine
  modified_base 11: mod_base = OTHER; note = 2'-fluorouridine
  modified_base 12: mod_base = OTHER; note = 2'-O-methyluridine
  modified_base 13: mod_base = OTHER; note = 2'-O-methylcytidine
  modified_base 14: mod_base = OTHER; note = 2'-O-methylguanosine
  modified_base 15: mod_base = OTHER; note = 2'-O-methylcytidine
  modified_base 16: mod_base = OTHER; note = 2'-O-methyluridine
  modified_base 17: mod_base = OTHER; note = 2'-O-methyluridine
  modified_base 18: mod_base = OTHER; note = 2'-O-methylcytidine
  modified_base 19: mod_base = OTHER; note = 2'-O-methyluridine with phosphorothioate linkage
  modified_base 20: mod_base = OTHER; note = 2'-O-methyladenosine with phosphorothioate linkage
  modified_base 21: mod_base = OTHER; note = 2'-O-methyladenosine
aatgattgctttcgcttctaa

SEQ ID NO: 3126 - RNA, 21 nt, synthetic construct
  source 1..21: mol_type = other RNA
  modified_base 1: mod_base = OTHER; note = 2'-O-methyladenosine with phosphorothioate linkage
  modified_base 2: mod_base = OTHER; note = 2'-O-methyluridine with phosphorothioate linkage
  modified_base 3: mod_base = OTHER; note = 2'-O-methylguanosine
  modified_base 4: mod_base = OTHER; note = 2'-O-methyladenosine
  modified_base 5: mod_base = OTHER; note = 2'-O-methyluridine
  modified_base 6: mod_base = OTHER; note = 2'-O-methyluridine
  modified_base 7: mod_base = OTHER; note = 2'-fluoroguanosine
  modified_base 8: mod_base = OTHER; note = 2'-O-methylcytidine
  modified_base 9: mod_base = OTHER; note = 2'-fluorouridine
  modified_base 10: mod_base = OTHER; note = 2'-fluorouridine
  modified_base 11: mod_base = OTHER; note = 2'-fluorouridine
  modified_base 12: mod_base = OTHER; note = 2'-O-methylcytidine
  modified_base 13: mod_base = OTHER; note = 2'-O-methylguanosine
  modified_base 14: mod_base = OTHER; note = 2'-O-methylcytidine
  modified_base 15: mod_base = OTHER; note = 2'-O-methyluridine
  modified_base 16: mod_base = OTHER; note = 2'-O-methyluridine
  modified_base 17: mod_base = OTHER; note = 2'-O-methylcytidine
  modified_base 18: mod_base = OTHER; note = 2'-O-methyluridine
  modified_base 19: mod_base = OTHER; note = 2'-O-methyladenosine with phosphorothioate linkage
  modified_base 20: mod_base = OTHER; note = 2'-O-methylcytidine with phosphorothioate linkage
  modified_base 21: mod_base = OTHER; note = 2'-O-methyladenosine
atgattgctttcgcttctaca

SEQ ID NO: 3127 - RNA, 21 nt, synthetic construct
  source 1..21: mol_type = other RNA
  modified_base 1: mod_base = OTHER; note = 2'-O-methyluridine with phosphorothioate linkage
  modified_base 2: mod_base = OTHER; note = 2'-O-methylguanosine with phosphorothioate linkage
  modified_base 3: mod_base = OTHER; note = 2'-O-methyladenosine
  modified_base 4: mod_base = OTHER; note = 2'-O-methyluridine
  modified_base 5: mod_base = OTHER; note = 2'-O-methyluridine
  modified_base 6: mod_base = OTHER; note = 2'-O-methylguanosine
  modified_base 7: mod_base = OTHER; note = 2'-fluorocytidine
  modified_base 8: mod_base = OTHER; note = 2'-O-methyluridine
  modified_base 9: mod_base = OTHER; note = 2'-fluorouridine
  modified_base 10: mod_base = OTHER; note = 2'-fluorouridine
  modified_base 11: mod_base = OTHER; note = 2'-fluorocytidine
  modified_base 12: mod_base = OTHER; note = 2'-O-methylguanosine
  modified_base 13: mod_base = OTHER; note = 2'-O-methylcytidine
  modified_base 14: mod_base = OTHER; note = 2'-O-methyluridine
  modified_base 15: mod_base = OTHER; note = 2'-O-methyluridine
  modified_base 16: mod_base = OTHER; note = 2'-O-methylcytidine
  modified_base 17: mod_base = OTHER; note = 2'-O-methyluridine
  modified_base 18: mod_base = OTHER; note = 2'-O-methyladenosine
  modified_base 19: mod_base = OTHER; note = 2'-O-methylcytidine with phosphorothioate linkage
  modified_base 20: mod_base = OTHER; note = 2'-O-methyladenosine with phosphorothioate linkage
  modified_base 21: mod_base = OTHER; note = 2'-O-methyladenosine
tgattgctttcgcttctacaa

SEQ ID NO: 3128 - RNA, 21 nt, synthetic construct
  source 1..21: mol_type = other RNA
  modified_base 1: mod_base = OTHER; note = 2'-O-methyladenosine with phosphorothioate linkage
  modified_base 2: mod_base = OTHER; note = 2'-O-methyluridine with phosphorothioate linkage
  modified_base 3: mod_base = OTHER; note = 2'-O-methyluridine
  modified_base 4: mod_base = OTHER; note = 2'-O-methyluridine
  modified_base 5: mod_base = OTHER; note = 2'-O-methyluridine
  modified_base 6: mod_base = OTHER; note = 2'-O-methyladenosine
  modified_base 7: mod_base = OTHER; note = 2'-fluoroguanosine
  modified_base 8: mod_base = OTHER; note = 2'-O-methylguanosine
  modified_base 9: mod_base = OTHER; note = 2'-fluoroguanosine
  modified_base 10: mod_base = OTHER; note = 2'-fluorouridine
  modified_base 11: mod_base = OTHER; note = 2'-fluorouridine
  modified_base 12: mod_base = OTHER; note = 2'-O-methylcytidine
  modified_base 13: mod_base = OTHER; note = 2'-O-methylcytidine
  modified_base 14: mod_base = OTHER; note = 2'-O-methyladenosine
  modified_base 15: mod_base = OTHER; note = 2'-O-methyluridine
  modified_base 16: mod_base = OTHER; note = 2'-O-methyluridine
  modified_base 17: mod_base = OTHER; note = 2'-O-methylguanosine
  modified_base 18: mod_base = OTHER; note = 2'-O-methyluridine
  modified_base 19: mod_base = OTHER; note = 2'-O-methylcytidine with phosphorothioate linkage
  modified_base 20: mod_base = OTHER; note = 2'-O-methyluridine with phosphorothioate linkage
  modified_base 21: mod_base = OTHER; note = 2'-O-methyladenosine
attttagggttccattgtcta

SEQ ID NO: 3129 - RNA, 21 nt, synthetic construct
  source 1..21: mol_type = other RNA
  modified_base 1: mod_base = OTHER; note = 2'-O-methyladenosine with phosphorothioate linkage
  modified_base 2: mod_base = OTHER; note = 2'-O-methyluridine with phosphorothioate linkage
  modified_base 3: mod_base = OTHER; note = 2'-O-methyluridine
  modified_base 4: mod_base = OTHER; note = 2'-O-methylguanosine
  modified_base 5: mod_base = OTHER; note = 2'-O-methyluridine
  modified_base 6: mod_base = OTHER; note = 2'-O-methylcytidine
  modified_base 7: mod_base = OTHER; note = 2'-fluorouridine
  modified_base 8: mod_base = OTHER; note = 2'-O-methyluridine
  modified_base 9: mod_base = OTHER; note = 2'-fluoroguanosine
  modified_base 10: mod_base = OTHER; note = 2'-fluoroguanosine
  modified_base 11: mod_base = OTHER; note = 2'-fluorouridine
  modified_base 12: mod_base = OTHER; note = 2'-O-methylguanosine
  modified_base 13: mod_base = OTHER; note = 2'-O-methylguanosine
  modified_base 14: mod_base = OTHER; note = 2'-O-methyluridine
  modified_base 15: mod_base = OTHER; note = 2'-O-methylguanosine
  modified_base 16: mod_base = OTHER; note = 2'-O-methyluridine
  modified_base 17: mod_base = OTHER; note = 2'-O-methyluridine
  modified_base 18: mod_base = OTHER; note = 2'-O-methyladenosine
  modified_base 19: mod_base = OTHER; note = 2'-O-methylcytidine with phosphorothioate linkage
  modified_base 20: mod_base = OTHER; note = 2'-O-methyladenosine with phosphorothioate linkage
  modified_base 21: mod_base = OTHER; note = 2'-O-methyladenosine
attgtcttggtggtgttacaa

SEQ ID NO: 3130 - RNA, 21 nt, synthetic construct
  source 1..21: mol_type = other RNA
  modified_base 1: mod_base = OTHER; note = 2'-O-methyluridine with phosphorothioate linkage
  modified_base 2: mod_base = OTHER; note = 2'-O-methylguanosine with phosphorothioate linkage
  modified_base 3: mod_base = OTHER; note = 2'-O-methylguanosine
  modified_base 4: mod_base = OTHER; note = 2'-O-methyluridine
  modified_base 5: mod_base = OTHER; note = 2'-O-methyladenosine
  modified_base 6: mod_base = OTHER; note = 2'-O-methylguanosine
  modified_base 7: mod_base = OTHER; note = 2'-fluorouridine
  modified_base 8: mod_base = OTHER; note = 2'-O-methylguanosine
  modified_base 9: mod_base = OTHER; note = 2'-fluoroguanosine
  modified_base 10: mod_base = OTHER; note = 2'-fluoroadenosine
  modified_base 11: mod_base = OTHER; note = 2'-fluoroadenosine
  modified_base 12: mod_base = OTHER; note = 2'-O-methyladenosine
  modified_base 13: mod_base = OTHER; note = 2'-O-methyluridine
  modified_base 14: mod_base = OTHER; note = 2'-O-methyluridine
  modified_base 15: mod_base = OTHER; note = 2'-O-methylcytidine
  modified_base 16: mod_base = OTHER; note = 2'-O-methyluridine
  modified_base 17: mod_base = OTHER; note = 2'-O-methyladenosine
  modified_base 18: mod_base = OTHER; note = 2'-O-methyluridine
  modified_base 19: mod_base = OTHER; note = 2'-O-methylguanosine with phosphorothioate linkage
  modified_base 20: mod_base = OTHER; note = 2'-O-methylcytidine with phosphorothioate linkage
  modified_base 21: mod_base = OTHER; note = 2'-O-methyladenosine
tggtagtggaaattctatgca

SEQ ID NO: 3131 - RNA, 21 nt, synthetic construct
  source 1..21: mol_type = other RNA
  modified_base 1: mod_base = OTHER; note = 2'-O-methyladenosine with phosphorothioate linkage
  modified_base 2: mod_base = OTHER; note = 2'-O-methylcytidine with phosphorothioate linkage
  modified_base 3: mod_base = OTHER; note = 2'-O-methylcytidine
  modified_base 4: mod_base = OTHER; note = 2'-O-methylguanosine
  modified_base 5: mod_base = OTHER; note = 2'-O-methylcytidine
  modified_base 6: mod_base = OTHER; note = 2'-O-methyluridine
  modified_base 7: mod_base = OTHER; note = 2'-fluorocytidine
  modified_base 8: mod_base = OTHER; note = 2'-O-methyluridine
  modified_base 9: mod_base = OTHER; note = 2'-fluorouridine
  modified_base 10: mod_base = OTHER; note = 2'-fluorocytidine
  modified_base 11: mod_base = OTHER; note = 2'-fluoroadenosine
  modified_base 12: mod_base = OTHER; note = 2'-O-methylguanosine
  modified_base 13: mod_base = OTHER; note = 2'-O-methylguanosine
  modified_base 14: mod_base = OTHER; note = 2'-O-methyluridine
  modified_base 15: mod_base = OTHER; note = 2'-O-methyluridine
  modified_base 16: mod_base = OTHER; note = 2'-O-methylguanosine
  modified_base 17: mod_base = OTHER; note = 2'-O-methyluridine
  modified_base 18: mod_base = OTHER; note = 2'-O-methyladenosine
  modified_base 19: mod_base = OTHER; note = 2'-O-methyladenosine with phosphorothioate linkage
  modified_base 20: mod_base = OTHER; note = 2'-O-methyladenosine with phosphorothioate linkage
  modified_base 21: mod_base = OTHER; note = 2'-O-methyladenosine
accgctcttcaggttgtaaaa

SEQ ID NO: 3132 - RNA, 21 nt, synthetic construct
  source 1..21: mol_type = other RNA
  modified_base 1: mod_base = OTHER; note = 2'-O-methylcytidine with phosphorothioate linkage
  modified_base 2: mod_base = OTHER; note = 2'-O-methyladenosine with phosphorothioate linkage
  modified_base 3: mod_base = OTHER; note = 2'-O-methyluridine
  modified_base 4: mod_base = OTHER; note = 2'-O-methylcytidine
  modified_base 5: mod_base = OTHER; note = 2'-O-methyluridine
  modified_base 6: mod_base = OTHER; note = 2'-O-methyladenosine
  modified_base 7: mod_base = OTHER; note = 2'-fluoroguanosine
  modified_base 8: mod_base = OTHER; note = 2'-O-methyluridine
  modified_base 9: mod_base = OTHER; note = 2'-fluoroguanosine
  modified_base 10: mod_base = OTHER; note = 2'-fluorouridine
  modified_base 11: mod_base = OTHER; note = 2'-fluorouridine
  modified_base 12: mod_base = OTHER; note = 2'-O-methyladenosine
  modified_base 13: mod_base = OTHER; note = 2'-O-methylguanosine
  modified_base 14: mod_base = OTHER; note = 2'-O-methylguanosine
  modified_base 15: mod_base = OTHER; note = 2'-O-methylcytidine
  modified_base 16: mod_base = OTHER; note = 2'-O-methyladenosine
  modified_base 17: mod_base = OTHER; note = 2'-O-methylcytidine
  modified_base 18: mod_base = OTHER; note = 2'-O-methyluridine
  modified_base 19: mod_base = OTHER; note = 2'-O-methyladenosine with phosphorothioate linkage
  modified_base 20: mod_base = OTHER; note = 2'-O-methyluridine with phosphorothioate linkage
  modified_base 21: mod_base = OTHER; note = 2'-O-methyladenosine
catctagtgttaggcactata

SEQ ID NO: 3133 - RNA, 21 nt, synthetic construct
  source 1..21: mol_type = other RNA
  modified_base 1: mod_base = OTHER; note = 2'-O-methyladenosine with phosphorothioate linkage
  modified_base 2: mod_base = OTHER; note = 2'-O-methyluridine with phosphorothioate linkage
  modified_base 3: mod_base = OTHER; note = 2'-O-methylcytidine
  modified_base 4: mod_base = OTHER; note = 2'-O-methyluridine
  modified_base 5: mod_base = OTHER; note = 2'-O-methyladenosine
  modified_base 6: mod_base = OTHER; note = 2'-O-methylguanosine
  modified_base 7: mod_base = OTHER; note = 2'-fluorouridine
  modified_base 8: mod_base = OTHER; note = 2'-O-methylguanosine
  modified_base 9: mod_base = OTHER; note = 2'-fluorouridine
  modified_base 10: mod_base = OTHER; note = 2'-fluorouridine
  modified_base 11: mod_base = OTHER; note = 2'-fluoroadenosine
  modified_base 12: mod_base = OTHER; note = 2'-O-methylguanosine
  modified_base 13: mod_base = OTHER; note = 2'-O-methylguanosine
  modified_base 14: mod_base = OTHER; note = 2'-O-methylcytidine
  modified_base 15: mod_base = OTHER; note = 2'-O-methyladenosine
  modified_base 16: mod_base = OTHER; note = 2'-O-methylcytidine
  modified_base 17: mod_base = OTHER; note = 2'-O-methyluridine
  modified_base 18: mod_base = OTHER; note = 2'-O-methyladenosine
  modified_base 19: mod_base = OTHER; note = 2'-O-methyluridine with phosphorothioate linkage
  modified_base 20: mod_base = OTHER; note = 2'-O-methyladenosine with phosphorothioate linkage
  modified_base 21: mod_base = OTHER; note = 2'-O-methyladenosine
atctagtgttaggcactataa

SEQ ID NO: 3134 - RNA, 21 nt, synthetic construct
  source 1..21: mol_type = other RNA
  modified_base 1: mod_base = OTHER; note = 2'-O-methylguanosine with phosphorothioate linkage
  modified_base 2: mod_base = OTHER; note = 2'-O-methyluridine with phosphorothioate linkage
  modified_base 3: mod_base = OTHER; note = 2'-O-methyluridine
  modified_base 4: mod_base = OTHER; note = 2'-O-methyladenosine
  modified_base 5: mod_base = OTHER; note = 2'-O-methylguanosine
  modified_base 6: mod_base = OTHER; note = 2'-O-methylguanosine
  modified_base 7: mod_base = OTHER; note = 2'-fluorocytidine
  modified_base 8: mod_base = OTHER; note = 2'-O-methyladenosine
  modified_base 9: mod_base = OTHER; note = 2'-fluorocytidine
  modified_base 10: mod_base = OTHER; note = 2'-fluorouridine
  modified_base 11: mod_base = OTHER; note = 2'-fluoroadenosine
  modified_base 12: mod_base = OTHER; note = 2'-O-methyluridine
  modified_base 13: mod_base = OTHER; note = 2'-O-methyladenosine
  modified_base 14: mod_base = OTHER; note = 2'-O-methylguanosine
  modified_base 15: mod_base = OTHER; note = 2'-O-methyluridine
  modified_base 16: mod_base = OTHER; note = 2'-O-methyladenosine
  modified_base 17: mod_base = OTHER; note = 2'-O-methyluridine
  modified_base 18: mod_base = OTHER; note = 2'-O-methyluridine
  modified_base 19: mod_base = OTHER; note = 2'-O-methyluridine with phosphorothioate linkage
  modified_base 20: mod_base = OTHER; note = 2'-O-methyladenosine with phosphorothioate linkage
  modified_base 21: mod_base = OTHER; note = 2'-O-methyladenosine
gttaggcactatagtatttaa

SEQ ID NO: 3135 - RNA, 21 nt, synthetic construct
  source 1..21: mol_type = other RNA
  modified_base 1: mod_base = OTHER; note = 2'-O-methyluridine with phosphorothioate linkage
  modified_base 2: mod_base = OTHER; note = 2'-O-methyladenosine with phosphorothioate linkage
  modified_base 3: mod_base = OTHER; note = 2'-O-methyladenosine
  modified_base 4: mod_base = OTHER; note = 2'-O-methyladenosine
  modified_base 5: mod_base = OTHER; note = 2'-O-methyladenosine
  modified_base 6: mod_base = OTHER; note = 2'-O-methylguanosine
  modified_base 7: mod_base = OTHER; note = 2'-fluoroguanosine
  modified_base 8: mod_base = OTHER; note = 2'-O-methyluridine
  modified_base 9: mod_base = OTHER; note = 2'-fluoroadenosine
  modified_base 10: mod_base = OTHER; note = 2'-fluorouridine
  modified_base 11: mod_base = OTHER; note = 2'-fluorocytidine
  modified_base 12: mod_base = OTHER; note = 2'-O-methyladenosine
  modified_base 13: mod_base = OTHER; note = 2'-O-methyladenosine
  modified_base 14: mod_base = OTHER; note = 2'-O-methyluridine
  modified_base 15: mod_base = OTHER; note = 2'-O-methylguanosine
  modified_base 16: mod_base = OTHER; note = 2'-O-methyluridine
  modified_base 17: mod_base = OTHER; note = 2'-O-methyladenosine
  modified_base 18: mod_base = OTHER; note = 2'-O-methylcytidine
  modified_base 19: mod_base = OTHER; note = 2'-O-methylcytidine with phosphorothioate linkage
  modified_base 20: mod_base = OTHER; note = 2'-O-methyluridine with phosphorothioate linkage
  modified_base 21: mod_base = OTHER; note = 2'-O-methyladenosine
taaaaggtatcaatgtaccta

SEQ ID NO: 3136 - RNA, 21 nt, synthetic construct
  source 1..21: mol_type = other RNA
  modified_base 1: mod_base = OTHER; note = 2'-O-methylcytidine with phosphorothioate linkage
  modified_base 2: mod_base = OTHER; note = 2'-O-methyladenosine with phosphorothioate linkage
  modified_base 3: mod_base = OTHER; note = 2'-O-methylguanosine
  modified_base 4: mod_base = OTHER; note = 2'-O-methylguanosine
  modified_base 5: mod_base = OTHER; note = 2'-O-methyladenosine
  modified_base 6: mod_base = OTHER; note = 2'-O-methyluridine
  modified_base 7: mod_base = OTHER; note = 2'-fluoroadenosine
  modified_base 8: mod_base = OTHER; note = 2'-O-methyladenosine
  modified_base 9: mod_base = OTHER; note = 2'-fluorouridine
  modified_base 10: mod_base = OTHER; note = 2'-fluoroadenosine
  modified_base 11: mod_base = OTHER; note = 2'-fluorouridine
  modified_base 12: mod_base = OTHER; note = 2'-O-methyladenosine
  modified_base 13: mod_base = OTHER; note = 2'-O-methylguanosine
  modified_base 14: mod_base = OTHER; note = 2'-O-methyluridine
  modified_base 15: mod_base = OTHER; note = 2'-O-methylguanosine
  modified_base 16: mod_base = OTHER; note = 2'-O-methylcytidine
  modified_base 17: mod_base = OTHER; note = 2'-O-methyladenosine
  modified_base 18: mod_base = OTHER; note = 2'-O-methyladenosine
  modified_base 19: mod_base = OTHER; note = 2'-O-methyladenosine with phosphorothioate linkage
  modified_base 20: mod_base = OTHER; note = 2'-O-methyluridine with phosphorothioate linkage
  modified_base 21: mod_base = OTHER; note = 2'-O-methyladenosine
caggataatatagtgcaaata

SEQ ID NO: 3137 - RNA, 21 nt, synthetic construct
  source 1..21: mol_type = other RNA
  modified_base 1: mod_base = OTHER; note = 2'-O-methylguanosine with phosphorothioate linkage
  modified_base 2: mod_base = OTHER; note = 2'-O-methyladenosine with phosphorothioate linkage
  modified_base 3: mod_base = OTHER; note = 2'-O-methylguanosine
  modified_base 4: mod_base = OTHER; note = 2'-O-methyladenosine
  modified_base 5: mod_base = OTHER; note = 2'-O-methyladenosine
  modified_base 6: mod_base = OTHER; note = 2'-O-methylguanosine
  modified_base 7: mod_base = OTHER; note = 2'-fluorocytidine
  modified_base 8: mod_base = OTHER; note = 2'-O-methylcytidine
  modified_base 9: mod_base = OTHER; note = 2'-fluoroadenosine
  modified_base 10: mod_base = OTHER; note = 2'-fluorouridine
  modified_base 11: mod_base = OTHER; note = 2'-fluoroadenosine
  modified_base 12: mod_base = OTHER; note = 2'-O-methyluridine
  modified_base 13: mod_base = OTHER; note = 2'-O-methyladenosine
  modified_base 14: mod_base = OTHER; note = 2'-O-methyladenosine
  modified_base 15: mod_base = OTHER; note = 2'-O-methyluridine
  modified_base 16: mod_base = OTHER; note = 2'-O-methylguanosine
  modified_base 17: mod_base = OTHER; note = 2'-O-methylguanosine
  modified_base 18: mod_base = OTHER; note = 2'-O-methylcytidine
  modified_base 19: mod_base = OTHER; note = 2'-O-methylguanosine with phosphorothioate linkage
  modified_base 20: mod_base = OTHER; note = 2'-O-methylguanosine with phosphorothioate linkage
  modified_base 21: mod_base = OTHER; note = 2'-O-methyladenosine
gagaagccatataatggcgga

SEQ ID NO: 3138 - RNA, 21 nt, synthetic construct
  source 1..21: mol_type = other RNA
  modified_base 1: mod_base = OTHER; note = 2'-O-methylguanosine with phosphorothioate linkage
  modified_base 2: mod_base = OTHER; note = 2'-O-methyladenosine with phosphorothioate linkage
  modified_base 3: mod_base = OTHER; note = 2'-O-methyladenosine
  modified_base 4: mod_base = OTHER; note = 2'-O-methylguanosine
  modified_base 5: mod_base = OTHER; note = 2'-O-methylcytidine
  modified_base 6: mod_base = OTHER; note = 2'-O-methylcytidine
  modified_base 7: mod_base = OTHER; note = 2'-fluoroadenosine
  modified_base 8: mod_base = OTHER; note = 2'-O-methyluridine
  modified_base 9: mod_base = OTHER; note = 2'-fluoroadenosine
  modified_base 10: mod_base = OTHER; note = 2'-fluorouridine
  modified_base 11: mod_base = OTHER; note = 2'-fluoroadenosine
  modified_base 12: mod_base = OTHER; note = 2'-O-methyladenosine
  modified_base 13: mod_base = OTHER; note = 2'-O-methyluridine
  modified_base 14: mod_base = OTHER; note = 2'-O-methylguanosine
  modified_base 15: mod_base = OTHER; note = 2'-O-methylguanosine
  modified_base 16: mod_base = OTHER; note = 2'-O-methylcytidine
  modified_base 17: mod_base = OTHER; note = 2'-O-methylguanosine
  modified_base 18: mod_base = OTHER; note = 2'-O-methylguanosine
  modified_base 19: mod_base = OTHER; note = 2'-O-methyluridine with phosphorothioate linkage
  modified_base 20: mod_base = OTHER; note = 2'-O-methyluridine with phosphorothioate linkage
  modified_base 21: mod_base = OTHER; note = 2'-O-methyladenosine
gaagccatataatggcggtta

SEQ ID NO: 3139 - RNA, 21 nt, synthetic construct
  source 1..21: mol_type = other RNA
  modified_base 1: mod_base = OTHER; note = 2'-O-methyluridine with phosphorothioate linkage
  modified_base 2: mod_base = OTHER; note = 2'-O-methylguanosine with phosphorothioate linkage
  modified_base 3: mod_base = OTHER; note = 2'-O-methylcytidine
  modified_base 4: mod_base = OTHER; note = 2'-O-methyladenosine
  modified_base 5: mod_base = OTHER; note = 2'-O-methylguanosine
  modified_base 6: mod_base = OTHER; note = 2'-O-methyluridine
  modified_base 7: mod_base = OTHER; note = 2'-fluoroadenosine
  modified_base 8: mod_base = OTHER; note = 2'-O-methylcytidine
  modified_base 9: mod_base = OTHER; note = 2'-fluorouridine
  modified_base 10: mod_base = OTHER; note = 2'-fluoroguanosine
  modified_base 11: mod_base = OTHER; note = 2'-fluorocytidine
  modified_base 12: mod_base = OTHER; note = 2'-O-methyladenosine
  modified_base 13: mod_base = OTHER; note = 2'-O-methyladenosine
  modified_base 14: mod_base = OTHER; note = 2'-O-methylguanosine
  modified_base 15: mod_base = OTHER; note = 2'-O-methylcytidine
  modified_base 16: mod_base = OTHER; note = 2'-O-methyluridine
  modified_base 17: mod_base = OTHER; note = 2'-O-methyladenosine
  modified_base 18: mod_base = OTHER; note = 2'-O-methyladenosine
  modified_base 19: mod_base = OTHER; note = 2'-O-methyluridine with phosphorothioate linkage
  modified_base 20: mod_base = OTHER; note = 2'-O-methyladenosine with phosphorothioate linkage
  modified_base 21: mod_base = OTHER; note = 2'-O-methyladenosine
tgcagtactgcaagctaataa

SEQ ID NO: 3140 - RNA, 21 nt, synthetic construct
  source 1..21: mol_type = other RNA
  modified_base 1: mod_base = OTHER; note = 2'-O-methylcytidine with phosphorothioate linkage
  modified_base 2: mod_base = OTHER; note = 2'-O-methyluridine with phosphorothioate linkage
  modified_base 3: mod_base = OTHER; note = 2'-O-methylguanosine
  modified_base 4: mod_base = OTHER; note = 2'-O-methylcytidine
  modified_base 5: mod_base = OTHER; note = 2'-O-methyladenosine
  modified_base 6: mod_base = OTHER; note = 2'-O-methyladenosine
  modified_base 7: mod_base = OTHER; note = 2'-fluoroguanosine
  modified_base 8: mod_base = OTHER; note = 2'-O-methylcytidine
  modified_base 9: mod_base = OTHER; note = 2'-fluorouridine
  modified_base 10: mod_base = OTHER; note = 2'-fluoroadenosine
  modified_base 11: mod_base = OTHER; note = 2'-fluoroadenosine
  modified_base 12: mod_base = OTHER; note = 2'-O-methyluridine
  modified_base 13: mod_base = OTHER; note = 2'-O-methyladenosine
  modified_base 14: mod_base = OTHER; note = 2'-O-methyladenosine
  modified_base 15: mod_base = OTHER; note = 2'-O-methylcytidine
  modified_base 16: mod_base = OTHER; note = 2'-O-methylguanosine
  modified_base 17: mod_base = OTHER; note = 2'-O-methyluridine
  modified_base 18: mod_base = OTHER; note = 2'-O-methyluridine
  modified_base 19: mod_base = OTHER; note = 2'-O-methylguanosine with phosphorothioate linkage
  modified_base 20: mod_base = OTHER; note = 2'-O-methylguanosine with phosphorothioate linkage
  modified_base 21: mod_base = OTHER; note = 2'-O-methyladenosine
ctgcaagctaataacgttgga

SEQ ID NO: 3141 - RNA, 21 nt, synthetic construct
  source 1..21: mol_type = other RNA
  modified_base 1: mod_base = OTHER; note = 2'-O-methyluridine with phosphorothioate linkage
  modified_base 2: mod_base = OTHER; note = 2'-O-methylguanosine with phosphorothioate linkage
  modified_base 3: mod_base = OTHER; note = 2'-O-methylcytidine
  modified_base 4: mod_base = OTHER; note = 2'-O-methyladenosine
  modified_base 5: mod_base = OTHER; note = 2'-O-methyladenosine
  modified_base 6: mod_base = OTHER; note = 2'-O-methylguanosine
  modified_base 7: mod_base = OTHER; note = 2'-fluorocytidine
  modified_base 8: mod_base = OTHER; note = 2'-O-methyluridine
  modified_base 9: mod_base = OTHER; note = 2'-fluoroadenosine
  modified_base 10: mod_base = OTHER; note = 2'-fluoroadenosine
  modified_base 11: mod_base = OTHER; note = 2'-fluorouridine
  modified_base 12: mod_base = OTHER; note = 2'-O-methyladenosine
  modified_base 13: mod_base = OTHER; note = 2'-O-methyladenosine
  modified_base 14: mod_base = OTHER; note = 2'-O-methylcytidine
  modified_base 15: mod_base = OTHER; note = 2'-O-methylguanosine
  modified_base 16: mod_base = OTHER; note = 2'-O-methyluridine
  modified_base 17: mod_base = OTHER; note = 2'-O-methyluridine
  modified_base 18: mod_base = OTHER; note = 2'-O-methylguanosine
  modified_base 19: mod_base = OTHER; note = 2'-O-methylguanosine with phosphorothioate linkage
  modified_base 20: mod_base = OTHER; note = 2'-O-methyluridine with phosphorothioate linkage
  modified_base 21: mod_base = OTHER; note = 2'-O-methyladenosine
tgcaagctaataacgttggta

SEQ ID NO: 3142 - RNA, 21 nt, synthetic construct
  source 1..21: mol_type = other RNA
  modified_base 1: mod_base = OTHER; note = 2'-O-methylguanosine with phosphorothioate linkage
  modified_base 2: mod_base = OTHER; note = 2'-O-methylcytidine with phosphorothioate linkage
  modified_base 3: mod_base = OTHER; note = 2'-O-methyladenosine
  modified_base 4: mod_base = OTHER; note = 2'-O-methyladenosine
  modified_base 5: mod_base = OTHER; note = 2'-O-methylguanosine
  modified_base 6: mod_base = OTHER; note = 2'-O-methylcytidine
  modified_base 7: mod_base = OTHER; note = 2'-fluorouridine
  modified_base 8: mod_base = OTHER; note = 2'-O-methyladenosine
  modified_base 9: mod_base = OTHER; note = 2'-fluoroadenosine
  modified_base 10: mod_base = OTHER; note = 2'-fluorouridine
  modified_base 11: mod_base = OTHER; note = 2'-fluoroadenosine
  modified_base 12: mod_base = OTHER; note = 2'-O-methyladenosine
  modified_base 13: mod_base = OTHER; note = 2'-O-methylcytidine
  modified_base 14: mod_base = OTHER; note = 2'-O-methylguanosine
  modified_base 15: mod_base = OTHER; note = 2'-O-methyluridine
  modified_base 16: mod_base = OTHER; note = 2'-O-methyluridine
  modified_base 17: mod_base = OTHER; note = 2'-O-methylguanosine
  modified_base 18: mod_base = OTHER; note = 2'-O-methylguanosine
  modified_base 19: mod_base = OTHER; note = 2'-O-methyluridine with phosphorothioate linkage
  modified_base 20: mod_base = OTHER; note = 2'-O-methyluridine with phosphorothioate linkage
  modified_base 21: mod_base = OTHER; note = 2'-O-methyladenosine
gcaagctaataacgttggtta

SEQ ID NO: 3143 - RNA, 21 nt, synthetic construct
  source 1..21: mol_type = other RNA
  modified_base 1: mod_base = OTHER; note = 2'-O-methyluridine with phosphorothioate linkage
  modified_base 2: mod_base = OTHER; note = 2'-O-methyladenosine with phosphorothioate linkage
  modified_base 3: mod_base = OTHER; note = 2'-O-methyladenosine
  modified_base 4: mod_base = OTHER; note = 2'-O-methyluridine
  modified_base 5: mod_base = OTHER; note = 2'-O-methyladenosine
  modified_base 6: mod_base = OTHER; note = 2'-O-methyladenosine
  modified_base 7: mod_base = OTHER; note = 2'-fluorocytidine
  modified_base 8: mod_base = OTHER; note = 2'-O-methylguanosine
  modified_base 9: mod_base = OTHER; note = 2'-fluorouridine
  modified_base 10: mod_base = OTHER; note = 2'-fluorouridine
  modified_base 11: mod_base = OTHER; note = 2'-fluoroguanosine
  modified_base 12: mod_base = OTHER; note = 2'-O-methylguanosine
  modified_base 13: mod_base = OTHER; note = 2'-O-methyluridine
  modified_base 14: mod_base = OTHER; note = 2'-O-methyluridine
  modified_base 15: mod_base = OTHER; note = 2'-O-methyluridine
  modified_base 16: mod_base = OTHER; note = 2'-O-methylguanosine
  modified_base 17: mod_base = OTHER; note = 2'-O-methyluridine
  modified_base 18: mod_base = OTHER; note = 2'-O-methyluridine
  modified_base 19: mod_base = OTHER; note = 2'-O-methyladenosine with phosphorothioate linkage
  modified_base 20: mod_base = OTHER; note = 2'-O-methyluridine with phosphorothioate linkage
  modified_base 21: mod_base = OTHER; note = 2'-O-methyladenosine
taataacgttggtttgttata

SEQ ID NO: 3144 - RNA, 21 nt, synthetic construct
  source 1..21: mol_type = other RNA
  modified_base 1: mod_base = OTHER; note = 2'-O-methyladenosine with phosphorothioate linkage
  modified_base 2: mod_base = OTHER; note = 2'-O-methylguanosine with phosphorothioate linkage
  modified_base 3: mod_base = OTHER; note = 2'-O-methyladenosine
  modified_base 4: mod_base = OTHER; note = 2'-O-methyladenosine
  modified_base 5: mod_base = OTHER; note = 2'-O-methyladenosine
  modified_base 6: mod_base = OTHER; note = 2'-O-methylguanosine
  modified_base 7: mod_base = OTHER; note = 2'-fluorocytidine
  modified_base 8: mod_base = OTHER; note = 2'-O-methylcytidine
  modified_base 9: mod_base = OTHER; note = 2'-fluorocytidine
  modified_base 10: mod_base = OTHER; note = 2'-fluoroguanosine
  modified_base 11: mod_base = OTHER; note = 2'-fluorocytidine
  modified_base 12: mod_base = OTHER; note = 2'-O-methyluridine
  modified_base 13: mod_base = OTHER; note = 2'-O-methyluridine
  modified_base 14: mod_base = OTHER; note = 2'-O-methyluridine
  modified_base 15: mod_base = OTHER; note = 2'-O-methyladenosine
  modified_base 16: mod_base = OTHER; note = 2'-O-methylguanosine
  modified_base 17: mod_base = OTHER; note = 2'-O-methyluridine
  modified_base 18: mod_base = OTHER; note = 2'-O-methylcytidine
  modified_base 19: mod_base = OTHER; note = 2'-O-methyladenosine with phosphorothioate linkage
  modified_base 20: mod_base = OTHER; note = 2'-O-methyladenosine with phosphorothioate linkage
  modified_base 21: mod_base = OTHER; note = 2'-O-methyladenosine
agaaagcccgctttagtcaaa

SEQ ID NO: 3145 - RNA, 21 nt, synthetic construct
  source 1..21: mol_type = other RNA
  modified_base 1: mod_base = OTHER; note = 2'-O-methylguanosine with phosphorothioate linkage
  modified_base 2: mod_base = OTHER; note = 2'-O-methyladenosine with phosphorothioate linkage
  modified_base 3: mod_base = OTHER; note = 2'-O-methyladenosine
  modified_base 4: mod_base = OTHER; note = 2'-O-methyladenosine
  modified_base 5: mod_base = OTHER; note = 2'-O-methylguanosine
  modified_base 6: mod_base = OTHER; note = 2'-O-methylcytidine
  modified_base 7: mod_base = OTHER; note = 2'-fluorocytidine
  modified_base 8: mod_base = OTHER; note = 2'-O-methylcytidine
  modified_base 9: mod_base = OTHER; note = 2'-fluoroguanosine
  modified_base 10: mod_base = OTHER; note = 2'-fluorocytidine
  modified_base 11: mod_base = OTHER; note = 2'-fluorouridine
  modified_base 12: mod_base = OTHER; note = 2'-O-methyluridine
  modified_base 13: mod_base = OTHER; note = 2'-O-methyluridine
  modified_base 14: mod_base = OTHER; note = 2'-O-methyladenosine
  modified_base 15: mod_base = OTHER; note = 2'-O-methylguanosine
  modified_base 16: mod_base = OTHER; note = 2'-O-methyluridine
  modified_base 17: mod_base = OTHER; note = 2'-O-methylcytidine
  modified_base 18: mod_base = OTHER; note = 2'-O-methyladenosine
  modified_base 19: mod_base = OTHER; note = 2'-O-methyladenosine with phosphorothioate linkage
  modified_base 20: mod_base = OTHER; note = 2'-O-methyluridine with phosphorothioate linkage
  modified_base 21: mod_base = OTHER; note = 2'-O-methyladenosine
gaaagcccgctttagtcaata

SEQ ID NO: 3146 - RNA, 21 nt, synthetic construct
  source 1..21: mol_type = other RNA
  modified_base 1: mod_base = OTHER; note = 2'-O-methyladenosine with phosphorothioate linkage
  modified_base 2: mod_base = OTHER; note = 2'-O-methyladenosine with phosphorothioate linkage
  modified_base 3: mod_base = OTHER; note = 2'-O-methyladenosine
  modified_base 4: mod_base = OTHER; note = 2'-O-methylguanosine
  modified_base 5: mod_base = OTHER; note = 2'-O-methylcytidine
  modified_base 6: mod_base = OTHER; note = 2'-O-methylcytidine
  modified_base 7: mod_base = OTHER; note = 2'-fluorocytidine
  modified_base 8: mod_base = OTHER; note = 2'-O-methylguanosine
  modified_base 9: mod_base = OTHER; note = 2'-fluorocytidine
  modified_base 10: mod_base = OTHER; note = 2'-fluorouridine
  modified_base 11: mod_base = OTHER; note = 2'-fluorouridine
  modified_base 12: mod_base = OTHER; note = 2'-O-methyluridine
  modified_base 13: mod_base = OTHER; note = 2'-O-methyladenosine
  modified_base 14: mod_base = OTHER; note = 2'-O-methylguanosine
  modified_base 15: mod_base = OTHER; note = 2'-O-methyluridine
  modified_base 16: mod_base = OTHER; note = 2'-O-methylcytidine
  modified_base 17: mod_base = OTHER; note = 2'-O-methyladenosine
  modified_base 18: mod_base = OTHER; note = 2'-O-methyladenosine
  modified_base 19: mod_base = OTHER; note = 2'-O-methyluridine with phosphorothioate linkage
  modified_base 20: mod_base = OTHER; note = 2'-O-methyladenosine with phosphorothioate linkage
  modified_base 21: mod_base = OTHER; note = 2'-O-methyladenosine
aaagcccgctttagtcaataa

SEQ ID NO: 3147 - RNA, 21 nt, synthetic construct
  source 1..21: mol_type = other RNA
  modified_base 1: mod_base = OTHER; note = 2'-O-methylguanosine with phosphorothioate linkage
  modified_base 2: mod_base = OTHER; note = 2'-O-methylcytidine with phosphorothioate linkage
  modified_base 3: mod_base = OTHER; note = 2'-O-methylcytidine
  modified_base 4: mod_base = OTHER; note = 2'-O-methylcytidine
  modified_base 5: mod_base = OTHER; note = 2'-O-methylguanosine
  modified_base 6: mod_base = OTHER; note = 2'-O-methylcytidine
  modified_base 7: mod_base = OTHER; note = 2'-fluorouridine
  modified_base 8: mod_base = OTHER; note = 2'-O-methyluridine
  modified_base 9: mod_base = OTHER; note = 2'-fluorouridine
  modified_base 10: mod_base = OTHER; note = 2'-fluoroadenosine
  modified_base 11: mod_base = OTHER; note = 2'-fluoroguanosine
  modified_base 12: mod_base = OTHER; note = 2'-O-methyluridine
  modified_base 13: mod_base = OTHER; note = 2'-O-methylcytidine
  modified_base 14: mod_base = OTHER; note = 2'-O-methyladenosine
  modified_base 15: mod_base = OTHER; note = 2'-O-methyladenosine
  modified_base 16: mod_base = OTHER; note = 2'-O-methyluridine
  modified_base 17: mod_base = OTHER; note = 2'-O-methyladenosine
  modified_base 18: mod_base = OTHER; note = 2'-O-methylcytidine
  modified_base 19: mod_base = OTHER; note = 2'-O-methyluridine with phosphorothioate linkage
  modified_base 20: mod_base = OTHER; note = 2'-O-methyluridine with phosphorothioate linkage
  modified_base 21: mod_base = OTHER; note = 2'-O-methyladenosine
gcccgctttagtcaatactta

SEQ ID NO: 3148 - RNA, 21 nt, synthetic construct
  source 1..21: mol_type = other RNA
  modified_base 1: mod_base = OTHER; note = 2'-O-methylguanosine with phosphorothioate linkage
  modified_base 2: mod_base = OTHER; note = 2'-O-methyluridine with phosphorothioate linkage
  modified_base 3: mod_base = OTHER; note = 2'-O-methyluridine
  modified_base 4: mod_base = OTHER; note = 2'-O-methylguanosine
  modified_base 5: mod_base = OTHER; note = 2'-O-methyluridine
  modified_base 6: mod_base = OTHER; note = 2'-O-methylcytidine
  modified_base 7: mod_base = OTHER; note = 2'-fluorouridine
  modified_base 8: mod_base = OTHER; note = 2'-O-methylguanosine
  modified_base 9: mod_base = OTHER; note = 2'-fluorocytidine
  modified_base 10: mod_base = OTHER; note = 2'-fluoroadenosine
  modified_base 11: mod_base = OTHER; note = 2'-fluorouridine
  modified_base 12: mod_base = OTHER; note = 2'-O-methyluridine
  modified_base 13: mod_base = OTHER; note = 2'-O-methyladenosine
  modified_base 14: mod_base = OTHER; note = 2'-O-methyladenosine
  modified_base 15: mod_base = OTHER; note = 2'-O-methylcytidine
  modified_base 16: mod_base = OTHER; note = 2'-O-methylcytidine
  modified_base 17: mod_base = OTHER; note = 2'-O-methyluridine
  modified_base 18: mod_base = OTHER; note = 2'-O-methylguanosine
  modified_base 19: mod_base = OTHER; note = 2'-O-methyluridine with phosphorothioate linkage
  modified_base 20: mod_base = OTHER; note = 2'-O-methyluridine with phosphorothioate linkage
  modified_base 21: mod_base = OTHER; note = 2'-O-methyladenosine
gttgtctgcattaacctgtta

SEQ ID NO: 3149 - RNA, 21 nt, synthetic construct
  source 1..21: mol_type = other RNA
  modified_base 1: mod_base = OTHER; note = 2'-O-methylguanosine with phosphorothioate linkage
  modified_base 2: mod_base = OTHER; note = 2'-O-methyluridine with phosphorothioate linkage
  modified_base 3: mod_base = OTHER; note = 2'-O-methyluridine
  modified_base 4: mod_base = OTHER; note = 2'-O-methylcytidine
  modified_base 5: mod_base = OTHER; note = 2'-O-methyladenosine
  modified_base 6: mod_base = OTHER; note = 2'-O-methyluridine
  modified_base 7: mod_base = OTHER; note = 2'-fluoroadenosine
  modified_base 8: mod_base = OTHER; note = 2'-O-methylcytidine
  modified_base 9: mod_base = OTHER; note = 2'-fluoroadenosine
  modified_base 10: mod_base = OTHER; note = 2'-fluorocytidine
  modified_base 11: mod_base = OTHER; note = 2'-fluorocytidine
  modified_base 12: mod_base = OTHER; note = 2'-O-methylcytidine
  modified_base 13: mod_base = OTHER; note = 2'-O-methyladenosine
  modified_base 14: mod_base = OTHER; note = 2'-O-methyluridine
  modified_base 15: mod_base = OTHER; note = 2'-O-methyluridine
  modified_base 16: mod_base = OTHER; note = 2'-O-methyluridine
  modified_base 17: mod_base = OTHER; note = 2'-O-methyluridine
  modified_base 18: mod_base = OTHER; note = 2'-O-methylguanosine
  modified_base 19: mod_base = OTHER; note = 2'-O-methyluridine with phosphorothioate linkage
  modified_base 20: mod_base = OTHER; note = 2'-O-methylcytidine with phosphorothioate linkage
  modified_base 21: mod_base = OTHER; note = 2'-O-methyladenosine
gttcatacacccattttgtca

SEQ ID NO: 3150 - RNA, 21 nt, synthetic construct
  source 1..21: mol_type = other RNA
  modified_base 1: mod_base = OTHER; note = 2'-O-methyluridine with phosphorothioate linkage
  modified_base 2: mod_base = OTHER; note = 2'-O-methylcytidine with phosphorothioate linkage
  modified_base 3: mod_base = OTHER; note = 2'-O-methyladenosine
  modified_base 4: mod_base = OTHER; note = 2'-O-methyluridine
  modified_base 5: mod_base = OTHER; note = 2'-O-methyladenosine
  modified_base 6: mod_base = OTHER; note = 2'-O-methylcytidine
  modified_base 7: mod_base = OTHER; note = 2'-fluoroadenosine
  modified_base 8: mod_base = OTHER; note = 2'-O-methylcytidine
  modified_base 9: mod_base = OTHER; note = 2'-fluorocytidine
  modified_base 10: mod_base = OTHER; note = 2'-fluorocytidine
  modified_base 11: mod_base = OTHER; note = 2'-fluoroadenosine
  modified_base 12: mod_base = OTHER; note = 2'-O-methyluridine
  modified_base 13: mod_base = OTHER; note = 2'-O-methyluridine
  modified_base 14: mod_base = OTHER; note = 2'-O-methyluridine
  modified_base 15: mod_base = OTHER; note = 2'-O-methyluridine
  modified_base 16: mod_base = OTHER; note = 2'-O-methylguanosine
  modified_base 17: mod_base = OTHER; note = 2'-O-methyluridine
  modified_base 18: mod_base = OTHER; note = 2'-O-methylcytidine
  modified_base 19: mod_base = OTHER; note = 2'-O-methylcytidine with phosphorothioate linkage
  modified_base 20: mod_base = OTHER; note = 2'-O-methylcytidine with phosphorothioate linkage
  modified_base 21: mod_base = OTHER; note = 2'-O-methyladenosine
tcatacacccattttgtccca

SEQ ID NO: 3151 - RNA, 21 nt, synthetic construct
  source 1..21: mol_type = other RNA
  modified_base 1: mod_base = OTHER; note = 2'-O-methyluridine with phosphorothioate linkage attached to aminohexyl spacer (NH2C6)
  modified_base 2: mod_base = OTHER; note = 2'-O-methylguanosine with phosphorothioate linkage
  modified_base 3: mod_base = OTHER; note = 2'-O-methylguanosine
  modified_base 4: mod_base = OTHER; note = 2'-O-methyladenosine
  modified_base 5: mod_base = OTHER; note = 2'-O-methyluridine
  modified_base 6: mod_base = OTHER; note = 2'-O-methyluridine
  modified_base 7: mod_base = OTHER; note = 2'-fluoroadenosine
  modified_base 8: mod_base = OTHER; note = 2'-O-methyladenosine
  modified_base 9: mod_base = OTHER; note = 2'-fluoroguanosine
  modified_base 10: mod_base = OTHER; note = 2'-fluoroadenosine
  modified_base 11: mod_base = OTHER; note = 2'-fluoroadenosine
  modified_base 12: mod_base = OTHER; note = 2'-O-methyluridine
  modified_base 13: mod_base = OTHER; note = 2'-O-methylcytidine
  modified_base 14: mod_base = OTHER; note = 2'-O-methyluridine
  modified_base 15: mod_base = OTHER; note = 2'-O-methyladenosine
  modified_base 16: mod_base = OTHER; note = 2'-fluorocytidine
  modified_base 17: mod_base = OTHER; note = 2'-fluorouridine
  modified_base 18: mod_base = OTHER; note = 2'-O-methyluridine
  modified_base 19: mod_base = OTHER; note = 2'-O-methyladenosine with phosphorothioate linkage
  modified_base 20: mod_base = OTHER; note = 2'-O-methylguanosine with phosphorothioate linkage
  modified_base 21: mod_base = OTHER; note = 2'-O-methyladenosine
tggattaagaatctacttaga

SEQ ID NO: 3152 - RNA, 21 nt, synthetic construct
  source 1..21: mol_type = other RNA
  modified_base 1: mod_base = OTHER; note = 2'-O-methylcytidine with phosphorothioate linkage attached to aminohexyl spacer (NH2C6)
  modified_base 2: mod_base = OTHER; note = 2'-O-methyladenosine with phosphorothioate linkage
  modified_base 3: mod_base = OTHER; note = 2'-O-methylcytidine
  modified_base 4: mod_base = OTHER; note = 2'-O-methyladenosine
  modified_base 5: mod_base = OTHER; note = 2'-O-methyladenosine
  modified_base 6: mod_base = OTHER; note = 2'-O-methyladenosine
  modified_base 7: mod_base = OTHER; note = 2'-fluorocytidine
  modified_base 8: mod_base = OTHER; note = 2'-O-methylguanosine
  modified_base 9: mod_base = OTHER; note = 2'-fluoroguanosine
  modified_base 10: mod_base = OTHER; note = 2'-fluoroadenosine
  modified_base 11: mod_base = OTHER; note = 2'-fluoroadenosine
  modified_base 12: mod_base = OTHER; note = 2'-O-methyladenosine
  modified_base 13: mod_base = OTHER; note = 2'-O-methylcytidine
  modified_base 14: mod_base = OTHER; note = 2'-O-methyladenosine
  modified_base 15: mod_base = OTHER; note = 2'-O-methyladenosine
  modified_base 16: mod_base = OTHER; note = 2'-fluorouridine
  modified_base 17: mod_base = OTHER; note = 2'-fluoroguanosine
  modified_base 18: mod_base = OTHER; note = 2'-O-methylcytidine
  modified_base 19: mod_base = OTHER; note = 2'-O-methyladenosine with phosphorothioate linkage
  modified_base 20: mod_base = OTHER; note = 2'-O-methyladenosine with phosphorothioate linkage
  modified_base 21: mod_base = OTHER; note = 2'-O-methyluridine
cacaaacggaaacaatgcaat

SEQ ID NO: 3153 - RNA, 21 nt, synthetic construct
  source 1..21: mol_type = other RNA
  modified_base 1: mod_base = OTHER; note = 2'-O-methyladenosine with phosphorothioate linkage attached to aminohexyl spacer (NH2C6)
  modified_base 2: mod_base = OTHER; note = 2'-O-methylcytidine with phosphorothioate linkage
  modified_base 3: mod_base = OTHER; note = 2'-O-methyladenosine
  modified_base 4: mod_base = OTHER; note = 2'-O-methyluridine
  modified_base 5: mod_base = OTHER; note = 2'-O-methyluridine
  modified_base 6: mod_base = OTHER; note = 2'-O-methylcytidine
  modified_base 7: mod_base = OTHER; note = 2'-fluorouridine
  modified_base 8: mod_base = OTHER; note = 2'-O-methyluridine
  modified_base 9: mod_base = OTHER; note = 2'-fluoroadenosine
  modified_base 10: mod_base = OTHER; note = 2'-fluorouridine
  modified_base 11: mod_base = OTHER; note = 2'-fluorouridine
  modified_base 12: mod_base = OTHER; note = 2'-O-methyluridine
  modified_base 13: mod_base = OTHER; note = 2'-O-methyluridine
  modified_base 14: mod_base = OTHER; note = 2'-O-methyluridine
  modified_base 15: mod_base = OTHER; note = 2'-O-methyladenosine
  modified_base 16: mod_base = OTHER; note = 2'-O-methyluridine
  modified_base 17: mod_base = OTHER; note = 2'-O-methylcytidine
  modified_base 18: mod_base = OTHER; note = 2'-O-methylguanosine
  modified_base 19: mod_base = OTHER; note = 2'-O-methyladenosine with phosphorothioate linkage
  modified_base 20: mod_base = OTHER; note = 2'-O-methylguanosine with phosphorothioate linkage
  modified_base 21: mod_base = OTHER; note = 2'-O-methyladenosine
acattcttatttttatcgaga

SEQ ID NO: 3154 - RNA, 21 nt, synthetic construct
  source 1..21: mol_type = other RNA
  modified_base 1: mod_base = OTHER; note = 2'-O-methylguanosine with phosphorothioate linkage attached to aminohexyl spacer (NH2C6)
  modified_base 2: mod_base = OTHER; note = 2'-O-methylcytidine with phosphorothioate linkage
  modified_base 3: mod_base = OTHER; note = 2'-O-methyladenosine
  modified_base 4: mod_base = OTHER; note = 2'-O-methyladenosine
  modified_base 5: mod_base = OTHER; note = 2'-O-methyladenosine
  modified_base 6: mod_base = OTHER; note = 2'-O-methylcytidine
  modified_base 7: mod_base = OTHER; note = 2'-fluoroadenosine
  modified_base 8: mod_base = OTHER; note = 2'-O-methylguanosine
  modified_base 9: mod_base = OTHER; note = 2'-fluorocytidine
  modified_base 10: mod_base = OTHER; note = 2'-fluorocytidine
  modified_base 11: mod_base = OTHER; note = 2'-fluoroadenosine
  modified_base 12: mod_base = OTHER; note = 2'-O-methyluridine
  modified_base 13: mod_base = OTHER; note = 2'-O-methyluridine
  modified_base 14: mod_base = OTHER; note = 2'-O-methylcytidine
  modified_base 15: mod_base = OTHER; note = 2'-O-methyladenosine
  modified_base 16: mod_base = OTHER; note = 2'-fluorocytidine
  modified_base 17: mod_base = OTHER; note = 2'-fluorocytidine
  modified_base 18: mod_base = OTHER; note = 2'-O-methyladenosine
  misc_difference 19: note = Any nucleotide (a, g, c, u, t) modified or unmodified with phosphorothioate linkage
  modified_base 20: mod_base = OTHER; note = 2'-O-methyluridine with phosphorothioate linkage
  modified_base 21: mod_base = OTHER; note = 2'-O-methyluridine
gcaaacagccattcaccantt

SEQ ID NO: 3155 - RNA, 21 nt, synthetic construct
  source 1..21: mol_type = other RNA
  modified_base 1: mod_base = OTHER; note = 2'-O-methyladenosine with phosphorothioate linkage attached to aminohexyl spacer (NH2C6)
  modified_base 2: mod_base = OTHER; note = 2'-O-methyluridine with phosphorothioate linkage
  modified_base 3: mod_base = OTHER; note = 2'-O-methylguanosine
  modified_base 4: mod_base = OTHER; note = 2'-O-methyluridine
  modified_base 5: mod_base = OTHER; note = 2'-O-methyladenosine
  modified_base 6: mod_base = OTHER; note = 2'-O-methylcytidine
  modified_base 7: mod_base = OTHER; note = 2'-fluoroadenosine
  modified_base 8: mod_base = OTHER; note = 2'-O-methyladenosine
  modified_base 9: mod_base = OTHER; note = 2'-fluorocytidine
  modified_base 10: mod_base = OTHER; note = 2'-fluorouridine
  modified_base 11: mod_base = OTHER; note = 2'-fluorouridine
  modified_base 12: mod_base = OTHER; note = 2'-O-methylguanosine
  modified_base 13: mod_base = OTHER; note = 2'-O-methylcytidine
  modified_base 14: mod_base = OTHER; note = 2'-O-methyladenosine
  modified_base 15: mod_base = OTHER; note = 2'-O-methyladenosine
  modified_base 16: mod_base = OTHER; note = 2'-fluoroadenosine
  modified_base 17: mod_base = OTHER; note = 2'-fluorocytidine
  modified_base 18: mod_base = OTHER; note = 2'-O-methyladenosine
  misc_difference 19: note = Any nucleotide (a, g, c, u, t) modified or unmodified with phosphorothioate linkage
  modified_base 20: mod_base = OTHER; note = 2'-O-methylcytidine with phosphorothioate linkage
  modified_base 21: mod_base = OTHER; note = 2'-O-methyladenosine
atgtacaacttgcaaacanca

SEQ ID NO: 3156 - RNA, 21 nt, synthetic construct
  source 1..21: mol_type = other RNA
  modified_base 1: mod_base = OTHER; note = 2'-O-methyladenosine with phosphorothioate linkage attached to aminohexyl spacer (NH2C6)
  modified_base 2: mod_base = OTHER; note = 2'-O-methyladenosine with phosphorothioate linkage
  modified_base 3: mod_base = OTHER; note = 2'-O-methylcytidine
  modified_base 4: mod_base = OTHER; note = 2'-O-methyladenosine
  modified_base 5: mod_base = OTHER; note = 2'-O-methylcytidine
  modified_base 6: mod_base = OTHER; note = 2'-O-methylguanosine
  modified_base 7: mod_base = OTHER; note = 2'-fluorocytidine
  modified_base 8: mod_base = OTHER; note = 2'-O-methyladenosine
  modified_base 9: mod_base = OTHER; note = 2'-fluorocytidine
  modified_base 10: mod_base = OTHER; note = 2'-fluoroadenosine
  modified_base 11: mod_base = OTHER; note = 2'-fluoroguanosine
  modified_base 12: mod_base = OTHER; note = 2'-O-methyladenosine
  modified_base 13: mod_base = OTHER; note = 2'-O-methyladenosine
  modified_base 14: mod_base = OTHER; note = 2'-O-methylcytidine
  modified_base 15: mod_base = OTHER; note = 2'-O-methyladenosine
  modified_base 16: mod_base = OTHER; note = 2'-fluorocytidine
  modified_base 17: mod_base = OTHER; note = 2'-fluorouridine
  modified_base 18: mod_base = OTHER; note = 2'-O-methylcytidine
  modified_base 19: mod_base = OTHER; note = 2'-O-methyladenosine with phosphorothioate linkage
  modified_base 20: mod_base = OTHER; note = 2'-O-methyluridine with phosphorothioate linkage
  modified_base 21: mod_base = OTHER; note = 2'-O-methyluridine
aacacgcacagaacactcatt

SEQ ID NO: 3157 - RNA, 21 nt, synthetic construct
  source 1..21: mol_type = other RNA
  modified_base 1: mod_base = OTHER; note = 2'-O-methylguanosine with phosphorothioate linkage attached to aminohexyl spacer (NH2C6)
  modified_base 2: mod_base = OTHER; note = 2'-O-methylcytidine with phosphorothioate linkage
  modified_base 3: mod_base = OTHER; note = 2'-O-methyluridine
  modified_base 4: mod_base = OTHER; note = 2'-O-methyladenosine
  modified_base 5: mod_base = OTHER; note = 2'-O-methylcytidine
  modified_base 6: mod_base = OTHER; note = 2'-O-methyladenosine
  modified_base 7: mod_base = OTHER; note = 2'-fluorocytidine
  modified_base 8: mod_base = OTHER; note = 2'-O-methyladenosine
  modified_base 9: mod_base = OTHER; note = 2'-fluorouridine
  modified_base 10: mod_base = OTHER; note = 2'-fluoroguanosine
  modified_base 11: mod_base = OTHER; note = 2'-fluorouridine
  modified_base 12: mod_base = OTHER; note = 2'-O-methyladenosine
  modified_base 13: mod_base = OTHER; note = 2'-O-methylcytidine
  modified_base 14: mod_base = OTHER; note = 2'-O-methyladenosine
  modified_base 15: mod_base = OTHER; note = 2'-O-methyladenosine
  modified_base 16: mod_base = OTHER; note = 2'-fluorocytidine
  modified_base 17: mod_base = OTHER; note = 2'-fluorouridine
  modified_base 18: mod_base = OTHER; note = 2'-O-methyluridine
  modified_base 19: mod_base = OTHER; note = 2'-O-methylguanosine with phosphorothioate linkage
  modified_base 20: mod_base = OTHER; note = 2'-O-methylcytidine with phosphorothioate linkage
  modified_base 21: mod_base = OTHER; note = 2'-O-methyladenosine
gctacacatgtacaacttgca

SEQ ID NO: 3158 - RNA, 21 nt, synthetic construct
  source 1..21: mol_type = other RNA
  modified_base 1: mod_base = OTHER; note = 2'-O-methylcytidine with phosphorothioate linkage attached to aminohexyl spacer (NH2C6)
  modified_base 2: mod_base = OTHER; note = 2'-O-methyladenosine with phosphorothioate linkage
  modified_base 3: mod_base = OTHER; note = 2'-O-methylcytidine
  modified_base 4: mod_base = OTHER; note = 2'-O-methyladenosine
  modified_base 5: mod_base = OTHER; note = 2'-O-methyluridine
  modified_base 6: mod_base = OTHER; note = 2'-O-methylguanosine
  modified_base 7: mod_base = OTHER; note = 2'-fluorouridine
  modified_base 8: mod_base = OTHER; note = 2'-O-methyladenosine
  modified_base 9: mod_base = OTHER; note = 2'-fluorocytidine
  modified_base 10: mod_base = OTHER; note = 2'-fluoroadenosine
  modified_base 11: mod_base = OTHER; note = 2'-fluoroadenosine
  modified_base 12: mod_base = OTHER; note = 2'-O-methylcytidine
  modified_base 13: mod_base = OTHER; note = 2'-O-methyluridine
  modified_base 14: mod_base = OTHER; note = 2'-O-methyluridine
  modified_base 15: mod_base = OTHER; note = 2'-O-methylguanosine
  modified_base 16: mod_base = OTHER; note = 2'-O-methylcytidine
  modified_base 17: mod_base = OTHER; note = 2'-O-methyladenosine
  modified_base 18: mod_base = OTHER; note = 2'-O-methyladenosine
  modified_base 19: mod_base = OTHER; note = 2'-O-methyladenosine with phosphorothioate linkage
  modified_base 20: mod_base = OTHER; note = 2'-O-methylcytidine with phosphorothioate linkage
  modified_base 21: mod_base = OTHER; note = 2'-O-methyladenosine
cacatgtacaacttgcaaaca

SEQ ID NO: 3159 - RNA, 21 nt, synthetic construct
  source 1..21: mol_type = other RNA
  modified_base 1: mod_base = OTHER; note = 2'-O-methyladenosine with phosphorothioate linkage attached to aminohexyl spacer (NH2C6)
  modified_base 2: mod_base = OTHER; note = 2'-O-methylcytidine with phosphorothioate linkage
  modified_base 3: mod_base = OTHER; note = 2'-O-methyluridine
  modified_base 4: mod_base = OTHER; note = 2'-O-methyluridine
  modified_base 5: mod_base = OTHER; note = 2'-O-methylguanosine
  modified_base 6: mod_base = OTHER; note = 2'-O-methylcytidine
  modified_base 7: mod_base = OTHER; note = 2'-fluoroadenosine
  modified_base 8: mod_base = OTHER; note = 2'-O-methyladenosine
  modified_base 9: mod_base = OTHER; note = 2'-fluoroadenosine
  modified_base 10: mod_base = OTHER; note = 2'-fluorocytidine
  modified_base 11: mod_base = OTHER; note = 2'-fluoroadenosine
  modified_base 12: mod_base = OTHER; note = 2'-O-methylguanosine
  modified_base 13: mod_base = OTHER; note = 2'-O-methylcytidine
  modified_base 14: mod_base = OTHER; note = 2'-O-methylcytidine
  modified_base 15: mod_base = OTHER; note = 2'-O-methyladenosine
  modified_base 16: mod_base = OTHER; note = 2'-fluorouridine
  modified_base 17: mod_base = OTHER; note = 2'-fluorouridine
  modified_base 18: mod_base = OTHER; note = 2'-O-methylcytidine
  modified_base 19: mod_base = OTHER; note = 2'-O-methyladenosine with phosphorothioate linkage
  modified_base 20: mod_base = OTHER; note = 2'-O-methylcytidine with phosphorothioate linkage
  modified_base 21: mod_base = OTHER; note = 2'-O-methyladenosine
acttgcaaacagccattcaca

SEQ ID NO: 3160 - RNA, 21 nt, synthetic construct
  source 1..21: mol_type = other RNA
  modified_base 1: mod_base = OTHER; note = 2'-O-methylcytidine with phosphorothioate linkage attached to aminohexyl spacer (NH2C6)
  modified_base 2: mod_base = OTHER; note = 2'-O-methylguanosine with phosphorothioate linkage
  modified_base 3: mod_base = OTHER; note = 2'-O-methylcytidine
  modified_base 4: mod_base = OTHER; note = 2'-O-methyladenosine
  modified_base 5: mod_base = OTHER; note = 2'-O-methylcytidine
  modified_base 6: mod_base = OTHER; note = 2'-O-methyladenosine
  modified_base 7: mod_base = OTHER; note = 2'-fluoroguanosine
  modified_base 8: mod_base = OTHER; note = 2'-O-methyladenosine
  modified_base 9: mod_base = OTHER; note = 2'-fluoroadenosine
  modified_base 10: mod_base = OTHER; note = 2'-fluorocytidine
  modified_base 11: mod_base = OTHER; note = 2'-fluoroadenosine
  modified_base 12: mod_base = OTHER; note = 2'-O-methylcytidine
  modified_base 13: mod_base = OTHER; note = 2'-O-methyluridine
  modified_base 14: mod_base = OTHER; note = 2'-O-methylcytidine
  modified_base 15: mod_base = OTHER; note = 2'-O-methyladenosine
  modified_base 16: mod_base = OTHER; note = 2'-O-methyluridine
  modified_base 17: mod_base = OTHER; note = 2'-O-methylguanosine
  modified_base 18: mod_base = OTHER; note = 2'-O-methylguanosine
  modified_base 19: mod_base = OTHER; note = 2'-O-methyladenosine with phosphorothioate linkage
  modified_base 20: mod_base = OTHER; note = 2'-O-methyluridine with phosphorothioate linkage
  modified_base 21: mod_base = OTHER; note = 2'-O-methyladenosine
cgcacagaacactcatggata

SEQ ID NO: 3161 - RNA, 21 nt, synthetic construct
  source 1..21: mol_type = other RNA
  modified_base 1: mod_base = OTHER; note = 2'-O-methyladenosine with phosphorothioate linkage attached to aminohexyl spacer (NH2C6)
  modified_base 2: mod_base = OTHER; note = 2'-O-methyluridine with phosphorothioate linkage
  modified_base 3: mod_base = OTHER; note = 2'-O-methyluridine
  modified_base 4: mod_base = OTHER; note = 2'-O-methylcytidine
  modified_base 5: mod_base = OTHER; note = 2'-O-methyluridine
  modified_base 6: mod_base = OTHER; note = 2'-O-methyluridine
  modified_base 7: mod_base = OTHER; note = 2'-fluoroadenosine
  modified_base 8: mod_base = OTHER; note = 2'-O-methyluridine
  modified_base 9: mod_base = OTHER; note = 2'-fluorouridine
  modified_base 10: mod_base = OTHER; note = 2'-fluorouridine
  modified_base 11: mod_base = OTHER; note = 2'-fluorouridine
  modified_base 12: mod_base = OTHER; note = 2'-O-methyluridine
  modified_base 13: mod_base = OTHER; note = 2'-O-methyladenosine
  modified_base 14: mod_base = OTHER; note = 2'-O-methyluridine
  modified_base 15: mod_base = OTHER; note = 2'-O-methylcytidine
  modified_base 16: mod_base = OTHER; note = 2'-O-methylguanosine
  modified_base 17: mod_base = OTHER; note = 2'-O-methyladenosine
  modified_base 18: mod_base = OTHER; note = 2'-O-methylguanosine
  modified_base 19: mod_base = OTHER; note = 2'-O-methylcytidine with phosphorothioate linkage
  modified_base 20: mod_base = OTHER; note = 2'-O-methyladenosine with phosphorothioate linkage
  modified_base 21: mod_base = OTHER; note = 2'-O-methyladenosine
attcttatttttatcgagcaa

SEQ ID NO: 3162 - RNA, 21 nt, synthetic construct
  source 1..21: mol_type = other RNA
  modified_base 1: mod_base = OTHER; note = 2'-O-methyladenosine with phosphorothioate linkage attached to aminohexyl spacer (NH2C6)
  modified_base 2: mod_base = OTHER; note = 2'-O-methylguanosine with phosphorothioate linkage
  modified_base 3: mod_base = OTHER; note = 2'-O-methyluridine
  modified_base 4: mod_base = OTHER; note = 2'-O-methylguanosine
  modified_base 5: mod_base = OTHER; note = 2'-O-methylcytidine
  modified_base 6: mod_base = OTHER; note = 2'-O-methyladenosine
  modified_base 7: mod_base = OTHER; note = 2'-fluorouridine
  modified_base 8: mod_base = OTHER; note = 2'-O-methylguanosine
  modified_base 9: mod_base = OTHER; note = 2'-fluoroguanosine
  modified_base 10: mod_base = OTHER; note = 2'-fluorouridine
  modified_base 11: mod_base = OTHER; note = 2'-fluorouridine
  modified_base 12: mod_base = OTHER; note = 2'-O-methyluridine
  modified_base 13: mod_base = OTHER; note = 2'-O-methylcytidine
  modified_base 14: mod_base = OTHER; note = 2'-O-methyluridine
  modified_base 15: mod_base = OTHER; note = 2'-O-methylcytidine
  modified_base 16: mod_base = OTHER; note = 2'-fluorouridine
  modified_base 17: mod_base = OTHER; note = 2'-fluorouridine
  misc_difference 18: note = Any nucleotide (a, g, c, u, t) modified or unmodified
  modified_base 19: mod_base = OTHER; note = 2'-O-methylcytidine with phosphorothioate linkage
  modified_base 20: mod_base = OTHER; note = 2'-O-methyladenosine with phosphorothioate linkage
  modified_base 21: mod_base = OTHER; note = 2'-O-methyladenosine
agtgcatggtttctcttncaa

SEQ ID NO: 3163 - RNA, 21 nt, synthetic construct
  source 1..21: mol_type = other RNA
  modified_base 1: mod_base = OTHER; note = 2'-O-methyluridine with phosphorothioate linkage attached to aminohexyl spacer (NH2C6)
  modified_base 2: mod_base = OTHER; note = 2'-O-methylcytidine with phosphorothioate linkage
  modified_base 3: mod_base = OTHER; note = 2'-O-methyladenosine
  modified_base 4: mod_base = OTHER; note = 2'-O-methyluridine
  modified_base 5: mod_base = OTHER; note = 2'-O-methylcytidine
  modified_base 6: mod_base = OTHER; note = 2'-O-methyluridine
  modified_base 7: mod_base = OTHER; note = 2'-fluoroadenosine
  modified_base 8: mod_base = OTHER; note = 2'-O-methylguanosine
  modified_base 9: mod_base = OTHER; note = 2'-fluoroadenosine
  modified_base 10: mod_base = OTHER; note = 2'-fluoroguanosine
  modified_base 11: mod_base = OTHER; note = 2'-fluoroguanosine
  modified_base 12: mod_base = OTHER; note = 2'-O-methyladenosine
  modified_base 13: mod_base = OTHER; note = 2'-O-methyladenosine
  modified_base 14: mod_base = OTHER; note = 2'-O-methyluridine
  modified_base 15: mod_base = OTHER; note = 2'-O-methyluridine
  modified_base 16: mod_base = OTHER; note = 2'-O-methyluridine
  modified_base 17: mod_base = OTHER; note = 2'-O-methylguanosine
  modified_base 18: mod_base = OTHER; note = 2'-O-methylcytidine
  modified_base 19: mod_base = OTHER; note = 2'-O-methylcytidine with phosphorothioate linkage
  modified_base 20: mod_base = OTHER; note = 2'-O-methylcytidine with phosphorothioate linkage
  modified_base 21: mod_base = OTHER; note = 2'-O-methyladenosine
tcatctagaggaatttgccca

SEQ ID NO: 3164 - RNA, 21 nt, synthetic construct
  source 1..21: mol_type = other RNA
  modified_base 1: mod_base = OTHER; note = 2'-O-methylguanosine with phosphorothioate linkage attached to aminohexyl spacer (NH2C6)
  modified_base 2: mod_base = OTHER; note = 2'-O-methylguanosine with phosphorothioate linkage
  modified_base 3: mod_base = OTHER; note = 2'-O-methylcytidine
  modified_base 4: mod_base = OTHER; note = 2'-O-methylguanosine
  modified_base 5: mod_base = OTHER; note = 2'-O-methyladenosine
  modified_base 6: mod_base = OTHER; note = 2'-O-methylguanosine
  modified_base 7: mod_base = OTHER; note = 2'-fluoroadenosine
  modified_base 8: mod_base = OTHER; note = 2'-O-methyladenosine
  modified_base 9: mod_base = OTHER; note = 2'-fluoroguanosine
  modified_base 10: mod_base = OTHER; note = 2'-fluorocytidine
  modified_base 11: mod_base = OTHER; note = 2'-fluoroadenosine
  modified_base 12: mod_base = OTHER; note = 2'-O-methyluridine
  modified_base 13: mod_base = OTHER; note = 2'-O-methyladenosine
  modified_base 14: mod_base = OTHER; note = 2'-O-methyladenosine
  modified_base 15: mod_base = OTHER; note = 2'-O-methylguanosine
  modified_base 16: mod_base = OTHER; note = 2'-O-methylcytidine
  modified_base 17: mod_base = OTHER; note = 2'-O-methylguanosine
  modified_base 18: mod_base = OTHER; note = 2'-O-methylcytidine
  modified_base 19: mod_base = OTHER; note = 2'-O-methylguanosine with phosphorothioate linkage
  modified_base 20: mod_base = OTHER; note = 2'-O-methylguanosine with phosphorothioate linkage
  modified_base 21: mod_base = OTHER; note = 2'-O-methyladenosine
ggcgagaagcataagcgcgga

SEQ ID NO: 3165 - RNA, 21 nt, synthetic construct
  source 1..21: mol_type = other RNA
  modified_base 1: mod_base = OTHER; note = 2'-O-methylguanosine with phosphorothioate linkage attached to aminohexyl spacer (NH2C6)
  modified_base 2: mod_base = OTHER; note = 2'-O-methyluridine with phosphorothioate linkage
  modified_base 3: mod_base = OTHER; note = 2'-O-methyladenosine
  modified_base 4: mod_base = OTHER; note = 2'-O-methyladenosine
  modified_base 5: mod_base = OTHER; note = 2'-O-methylguanosine
  modified_base 6: mod_base = OTHER; note = 2'-O-methyladenosine
  modified_base 7: mod_base = OTHER; note = 2'-fluorouridine
  modified_base 8: mod_base = OTHER; note = 2'-O-methylguanosine
  modified_base 9: mod_base = OTHER; note = 2'-fluorocytidine
  modified_base 10: mod_base = OTHER; note = 2'-fluorocytidine
  modified_base 11: mod_base = OTHER; note = 2'-fluorouridine
  modified_base 12: mod_base = OTHER; note = 2'-O-methyluridine
  modified_base 13: mod_base = OTHER; note = 2'-O-methyluridine
  modified_base 14: mod_base = OTHER; note = 2'-O-methyluridine
  modified_base 15: mod_base = OTHER; note = 2'-O-methyladenosine
  modified_base 16: mod_base = OTHER; note = 2'-O-methylguanosine
  modified_base 17: mod_base = OTHER; note = 2'-O-methylcytidine
  modified_base 18: mod_base = OTHER; note = 2'-O-methylguanosine
  modified_base 19: mod_base = OTHER; note = 2'-O-methyluridine with phosphorothioate linkage
  modified_base 20: mod_base = OTHER; note = 2'-O-methylguanosine with phosphorothioate linkage
  modified_base 21: mod_base = OTHER; note = 2'-O-methyladenosine
gtaagatgccttttagcgtga

SEQ ID NO: 3166 - RNA, 21 nt, synthetic construct
  source 1..21: mol_type = other RNA
  modified_base 1: mod_base = OTHER; note = 2'-O-methylguanosine with phosphorothioate linkage attached to aminohexyl spacer (NH2C6)
  modified_base 2: mod_base = OTHER; note = 2'-O-methylguanosine with phosphorothioate linkage
  modified_base 3: mod_base = OTHER; note = 2'-O-methylguanosine
  modified_base 4: mod_base = OTHER; note = 2'-O-methyladenosine
  modified_base 5: mod_base = OTHER; note = 2'-O-methyluridine
  modified_base 6: mod_base = OTHER; note = 2'-O-methyluridine
  modified_base 7: mod_base = OTHER; note = 2'-fluorocytidine
  modified_base 8: mod_base = OTHER; note = 2'-O-methyladenosine
  modified_base 9: mod_base = OTHER; note = 2'-fluorouridine
  modified_base 10: mod_base = OTHER; note = 2'-fluoroadenosine
  modified_base 11: mod_base = OTHER; note = 2'-fluorouridine
  modified_base 12: mod_base = OTHER; note = 2'-O-methyluridine
  modified_base 13: mod_base = OTHER; note = 2'-O-methylguanosine
  modified_base 14: mod_base = OTHER; note = 2'-O-methylcytidine
  modified_base 15: mod_base = OTHER; note = 2'-O-methyladenosine
  modified_base 16: mod_base = OTHER; note = 2'-fluoroguanosine
  modified_base 17: mod_base = OTHER; note = 2'-fluoroadenosine
  modified_base 18: mod_base = OTHER; note = 2'-O-methylcytidine
  modified_base 19: mod_base = OTHER; note = 2'-O-methyladenosine with phosphorothioate linkage
  modified_base 20: mod_base = OTHER; note = 2'-O-methyladenosine with phosphorothioate linkage
  modified_base 21: mod_base = OTHER; note = 2'-O-methyluridine
gggattcatattgcagacaat

SEQ ID NO: 3167 - RNA, 16 nt, synthetic construct
  source 1..16: mol_type = other RNA
ccacctctggcacctg

SEQ ID NO: 3168 - RNA, 16 nt, synthetic construct
  source 1..16: mol_type = other RNA
catacccacttccctt

SEQ ID NO: 3169 - RNA, 17 nt, synthetic construct
  source 1..17: mol_type = other RNA
tttctgggctgccatta

SEQ ID NO: 3170 - RNA, 16 nt, synthetic construct
  source 1..16: mol_type = other RNA
agaacaggaagcaggt

SEQ ID NO: 3171 - RNA, 20 nt, synthetic construct
  source 1..20: mol_type = other RNA
ctagaattggcctgggacat

SEQ ID NO: 3172 - RNA, 16 nt, synthetic construct
  source 1..16: mol_type = other RNA
acccacttcccttcct

SEQ ID NO: 3173 - RNA, 20 nt, synthetic construct
  source 1..20: mol_type = other RNA
ccaagcattgcatcatcctg

SEQ ID NO: 3174 - RNA, 20 nt, synthetic construct
  source 1..20: mol_type = other RNA
tccaagcattgcatcatcct

SEQ ID NO: 3175 - RNA, 20 nt, synthetic construct
  source 1..20: mol_type = other RNA
ctccaagcattgcatcatcc

SEQ ID NO: 3176 - RNA, 16 nt, synthetic construct
  source 1..16: mol_type = other RNA
cctaagaaacatactg

SEQ ID NO: 3177 - RNA, 17 nt, synthetic construct
  source 1..17: mol_type = other RNA
tattgaccctggtgtgt

SEQ ID NO: 3178 - RNA, 19 nt, synthetic construct
  source 1..19: mol_type = other RNA
tagaattggcctgggacat

SEQ ID NO: 3179 - RNA, 20 nt, synthetic construct
  source 1..20: mol_type = other RNA
ctagaattggcctgggacat

SEQ ID NO: 3180 - RNA, 20 nt, synthetic construct
  source 1..20: mol_type = other RNA
ctccaagcattgcatcatcc

SEQ ID NO: 3181 - RNA, 20 nt, synthetic construct
  source 1..20: mol_type = other RNA
ttgcacattctgtaactcct

SEQ ID NO: 3182 - RNA, 20 nt, synthetic construct
  source 1..20: mol_type = other RNA
gggaaaggttgcacattctg

SEQ ID NO: 3183 - RNA, 20 nt, synthetic construct
  source 1..20: mol_type = other RNA
tcgtgccttattccttcagg

SEQ ID NO: 3184 - RNA, 19 nt, synthetic construct
  source 1..19: mol_type = other RNA
caagccaaagagctggaga

SEQ ID NO: 3185 - RNA, 20 nt, synthetic construct
  source 1..20: mol_type = other RNA
ggtttctgggctgccattat

SEQ ID NO: 3186 - RNA, 19 nt, synthetic construct
  source 1..19: mol_type = other RNA
tctgggagatcaccctaca

SEQ ID NO: 3187 - RNA, 20 nt, synthetic construct
  source 1..20: mol_type = other RNA
aaagggaagaatgctacagc

SEQ ID NO: 3188 - RNA, 20 nt, synthetic construct
  source 1..20: mol_type = other RNA
catccagaaactacgtttgt

SEQ ID NO: 3189 - RNA, 20 nt, synthetic construct
  source 1..20: mol_type = other RNA
taaatcttgatcaaactcag

SEQ ID NO: 3190 - RNA, 20 nt, synthetic construct
  source 1..20: mol_type = other RNA
atctataggtccaagttcgt

SEQ ID NO: 3191 - RNA, 20 nt, synthetic construct
  source 1..20: mol_type = other RNA
tttagccacctctggcacct

SEQ ID NO: 3192 - RNA, 18 nt, synthetic construct
  source 1..18: mol_type = other RNA
ctagaattggcctgggac

SEQ ID NO: 3193 - RNA, 19 nt, synthetic construct
  source 1..19: mol_type = other RNA
ttgcatcatcctggtacca

SEQ ID NO: 3194 - RNA, 20 nt, synthetic construct
  source 1..20: mol_type = other RNA
cctccaagcattgcatcatc

SEQ ID NO: 3195 - RNA, 18 nt, synthetic construct
  source 1..18: mol_type = other RNA
gagctcacagcctccaag

SEQ ID NO: 3196 - RNA, 20 nt, synthetic construct
  source 1..20: mol_type = other RNA
aactggagctttgtgaaacc

SEQ ID NO: 3197 - RNA, 20 nt, synthetic construct
  source 1..20: mol_type = other RNA
ccagggcagaactggagctt

SEQ ID NO: 3198 - RNA, 20 nt, synthetic construct
  source 1..20: mol_type = other RNA
aagggatagccctatgaggc

SEQ ID NO: 3199 - RNA, 20 nt, synthetic construct
  source 1..20: mol_type = other RNA
ttacagaatgccttgtccca

SEQ ID NO: 3200 - RNA, 18 nt, synthetic construct
  source 1..18: mol_type = other RNA
taagcaatggaagtccaa

SEQ ID NO: 3201 - RNA, 19 nt, synthetic construct
  source 1..19: mol_type = other RNA
cccagaaaaccagaaccgg

SEQ ID NO: 3202 - RNA, 18 nt, synthetic construct
  source 1..18: mol_type = other RNA
atcccagaaaaccagaac

SEQ ID NO: 3203 - RNA, 17 nt, synthetic construct
  source 1..17: mol_type = other RNA
acctaagaaacatactg

SEQ ID NO: 3204 - RNA, 18 nt, synthetic construct
  source 1..18: mol_type = other RNA
ctaaattacaagggtgtt

SEQ ID NO: 3205 - RNA, 18 nt, synthetic construct
  source 1..18: mol_type = other RNA
tctaaattacaagggtgt

SEQ ID NO: 3206 - RNA, 18 nt, synthetic construct
  source 1..18: mol_type = other RNA
tgtaattccaggctctaa

SEQ ID NO: 3207 - RNA, 18 nt, synthetic construct
  source 1..18: mol_type = other RNA
gtctagctgccttcctta

SEQ ID NO: 3208 - RNA, 18 nt, synthetic construct
  source 1..18: mol_type = other RNA
cctgtctagctgccttcc

SEQ ID NO: 3209 - RNA, 20 nt, synthetic construct
  source 1..20: mol_type = other RNA
gctatctgctcttacttatg

SEQ ID NO: 3210 - RNA, 19 nt, synthetic construct
  source 1..19: mol_type = other RNA
gctatctgctcttacttat

SEQ ID NO: 3211 - RNA, 17 nt, synthetic construct
  source 1..17: mol_type = other RNA
tattacctgtatggact

SEQ ID NO: 3212 - RNA, 18 nt, synthetic construct
  source 1..18: mol_type = other RNA
accctggtgtgttatgtc

SEQ ID NO: 3213 - RNA, 20 nt, synthetic construct
  source 1..20: mol_type = other RNA
tagcttcaaagttgtattga

SEQ ID NO: 3214 - RNA, 19 nt, synthetic construct
  source 1..19: mol_type = other RNA
agagggaatctggagagga

SEQ ID NO: 3215 - RNA, 18 nt, synthetic construct
  source 1..18: mol_type = other RNA
aattgagagggaatctgg

SEQ ID NO: 3216 - RNA, 16 nt, synthetic construct
  source 1..16: mol_type = other RNA
gtggccaggtaggacc

SEQ ID NO: 3217 - RNA, 16 nt, synthetic construct
  source 1..16: mol_type = other RNA
gtggccaggtaggacc

SEQ ID NO: 3218 - DNA, 16 bp, synthetic construct
  source 1..16: mol_type = other DNA
  modified_base 1: mod_base = OTHER; note = Locked nucleic acid with phosphorothioate linkage
  modified_base 2: mod_base = OTHER; note = 2'-O-methoxyethyl modified nucleotide
  modified_base 3: mod_base = OTHER; note = Locked nucleic acid
  modified_base 4: mod_base = OTHER; note = 2'-O-methoxyethyl modified nucleotide
  modified_base 5: mod_base = OTHER; note = Nucleotide with phosphorothioate linkage
  modified_base 6: mod_base = OTHER; note = Nucleotide with phosphorothioate linkage
  modified_base 7: mod_base = OTHER; note = Nucleotide with phosphorothioate linkage
  modified_base 8: mod_base = OTHER; note = Nucleotide with phosphorothioate linkage
  modified_base 9: mod_base = OTHER; note = Nucleotide with phosphorothioate linkage
  modified_base 10: mod_base = OTHER; note = Nucleotide with phosphorothioate linkage
  modified_base 11: mod_base = OTHER; note = Nucleotide with phosphorothioate linkage
  modified_base 12: mod_base = OTHER; note = Nucleotide with phosphorothioate linkage
  modified_base 13: mod_base = OTHER; note = 2'-O-methoxyethyl modified nucleotide
  modified_base 14: mod_base = OTHER; note = Locked nucleic acid with phosphorothioate linkage
  modified_base 15: mod_base = OTHER; note = 2'-O-methoxyethyl modified thymine with phosphorothioate linkage
  modified_base 16: mod_base = OTHER; note = Locked nucleic acid
  misc_feature 1..4: note = RNA
  misc_feature 5..12: note = DNA
  misc_feature 13..16: note = RNA
ccacctctggcacctg

SEQ ID NO: 3219 - DNA, 16 bp, synthetic construct
  source 1..16: mol_type = other DNA
  modified_base 1: mod_base = OTHER; note = Locked nucleic acid with phosphorothioate linkage
  modified_base 2: mod_base = OTHER; note = Locked nucleic acid
  modified_base 3: mod_base = OTHER; note = Locked thymine
  modified_base 4: mod_base = OTHER; note = Locked nucleic acid
  modified_base 5: mod_base = OTHER; note = Nucleotide with phosphorothioate linkage
  modified_base 6: mod_base = OTHER; note = Nucleotide with phosphorothioate linkage
  modified_base 7: mod_base = OTHER; note = Nucleotide with phosphorothioate linkage
  modified_base 8: mod_base = OTHER; note = Nucleotide with phosphorothioate linkage
  modified_base 9: mod_base = OTHER; note = Nucleotide with phosphorothioate linkage
  modified_base 10: mod_base = OTHER; note = Nucleotide with phosphorothioate linkage
  modified_base 11: mod_base = OTHER; note = Nucleotide with phosphorothioate linkage
  modified_base 12: mod_base = OTHER; note = Nucleotide with phosphorothioate linkage
  modified_base 13: mod_base = OTHER; note = Locked nucleic acid
  modified_base 14: mod_base = OTHER; note = Locked nucleic acid with phosphorothioate linkage
  modified_base 15: mod_base = OTHER; note = Locked thymine with phosphorothioate linkage
  modified_base 16: mod_base = OTHER; note = Locked thymine
catacccacttccctt

SEQ ID NO: 3220 - DNA, 17 bp, synthetic construct
  source 1..17: mol_type = other DNA
  modified_base 1: mod_base = OTHER; note = Locked thymine with phosphorothioate linkage
  modified_base 2: mod_base = OTHER; note = Locked thymine
  modified_base 3: mod_base = OTHER; note = Locked thymine
  modified_base 4: mod_base = OTHER; note = Locked nucleic acid
  modified_base 5: mod_base = OTHER; note = Nucleotide with phosphorothioate linkage
  modified_base 6: mod_base = OTHER; note = Nucleotide with phosphorothioate linkage
  modified_base 7: mod_base = OTHER; note = Nucleotide with phosphorothioate linkage
  modified_base 8: mod_base = OTHER; note = Nucleotide with phosphorothioate linkage
  modified_base 9: mod_base = OTHER; note = Nucleotide with phosphorothioate linkage
  modified_base 10: mod_base = OTHER; note = Nucleotide with phosphorothioate linkage
  modified_base 11: mod_base = OTHER; note = Nucleotide with phosphorothioate linkage
  modified_base 12: mod_base = OTHER; note = Nucleotide with phosphorothioate linkage
  modified_base 13: mod_base = OTHER; note = Nucleotide with phosphorothioate linkage
  modified_base 14: mod_base = OTHER; note = Nucleotide with phosphorothioate linkage
  modified_base 15: mod_base = OTHER; note = Locked thymine with phosphorothioate linkage
  modified_base 16: mod_base = OTHER; note = Locked thymine with phosphorothioate linkage
  modified_base 17: mod_base = OTHER; note = Locked nucleic acid
tttctgggctgccatta

SEQ ID NO: 3221 - DNA, 16 bp, synthetic construct
  source 1..16: mol_type = other DNA
  modified_base 1: mod_base = OTHER; note = Locked nucleic acid with phosphorothioate linkage
  modified_base 2: mod_base = OTHER; note = 2'-O-methoxyethyl modified nucleotide
  modified_base 3: mod_base = OTHER; note = Locked nucleic acid
  modified_base 4: mod_base = OTHER; note = Nucleotide with phosphorothioate linkage
  modified_base 5: mod_base = OTHER; note = Nucleotide with phosphorothioate linkage
  modified_base 6: mod_base = OTHER; note = Nucleotide with phosphorothioate linkage
  modified_base 7: mod_base = OTHER; note = Nucleotide with phosphorothioate linkage
  modified_base 8: mod_base = OTHER; note = Nucleotide with phosphorothioate linkage
  modified_base 9: mod_base = OTHER; note = Nucleotide with phosphorothioate linkage
  modified_base 10: mod_base = OTHER; note = Nucleotide with phosphorothioate linkage
  modified_base 11: mod_base = OTHER; note = Nucleotide with phosphorothioate linkage
  modified_base 12: mod_base = OTHER; note = Nucleotide with phosphorothioate linkage
  modified_base 13: mod_base = OTHER; note = Nucleotide with phosphorothioate linkage
  modified_base 14: mod_base = OTHER; note = Locked nucleic acid with phosphorothioate linkage
  modified_base 15: mod_base = OTHER; note = 2'-O-methoxyethyl modified nucleotide with phosphorothioate linkage
  modified_base 16: mod_base = OTHER; note = Locked thymine
  misc_feature 1..3: note = RNA
  misc_feature 4..13: note = DNA
  misc_feature 14..16: note = RNA
agaacaggaagcaggt

SEQ ID NO: 3222 - DNA, 20 bp, synthetic construct
  source 1..20: mol_type = other DNA
  modified_base 1: mod_base = OTHER; note = Locked nucleic acid with phosphorothioate linkage
  modified_base 2: mod_base = OTHER; note = Locked thymine
  modified_base 3: mod_base = OTHER; note = Locked nucleic acid
  modified_base 4: mod_base = OTHER; note = Locked nucleic acid
  modified_base 5: mod_base = OTHER; note = Locked nucleic acid
  modified_base 6: mod_base = OTHER; note = Nucleotide with phosphorothioate linkage
  modified_base 7: mod_base = OTHER; note = Nucleotide with phosphorothioate linkage
  modified_base 8: mod_base = OTHER; note = Nucleotide with phosphorothioate linkage
  modified_base 9: mod_base = OTHER; note = Nucleotide with phosphorothioate linkage
  modified_base 10: mod_base = OTHER; note = Nucleotide with phosphorothioate linkage
  modified_base 11: mod_base = OTHER; note = Nucleotide with phosphorothioate linkage
  modified_base 12: mod_base = OTHER; note = Nucleotide with phosphorothioate linkage
  modified_base 13: mod_base = OTHER; note = Nucleotide with phosphorothioate linkage
  modified_base 14: mod_base = OTHER; note = Nucleotide with phosphorothioate linkage
  modified_base 15: mod_base = OTHER; note = Nucleotide with phosphorothioate linkage
  modified_base 16: mod_base = OTHER; note = Locked nucleic acid
  modified_base 17: mod_base = OTHER; note = Locked nucleic acid
  modified_base 18: mod_base = OTHER; note = Locked nucleic acid with phosphorothioate linkage
  modified_base 19: mod_base = OTHER; note = Locked nucleic acid with phosphorothioate linkage
  modified_base 20: mod_base = OTHER; note = Locked thymine
ctagaattggcctgggacat

SEQ ID NO: 3223 - DNA, 16 bp, synthetic construct
  source 1..16: mol_type = other DNA
  modified_base 1: mod_base = OTHER; note = Locked nucleic acid with phosphorothioate linkage
  modified_base 2: mod_base = OTHER; note = Locked nucleic acid
  modified_base 3: mod_base = OTHER; note = Locked nucleic acid
  modified_base 4: mod_base = OTHER; note = Locked nucleic acid
  modified_base 5: mod_base = OTHER; note = Nucleotide with phosphorothioate linkage
  modified_base 6: mod_base = OTHER; note = Nucleotide with phosphorothioate linkage
  modified_base 7: mod_base = OTHER; note = Nucleotide with phosphorothioate linkage
  modified_base 8: mod_base = OTHER; note = Nucleotide with phosphorothioate linkage
  modified_base 9: mod_base = OTHER; note = Nucleotide with phosphorothioate linkage
  modified_base 10: mod_base = OTHER; note = Nucleotide with phosphorothioate linkage
  modified_base 11: mod_base = OTHER; note = Nucleotide with phosphorothioate linkage
  modified_base 12: mod_base = OTHER; note = Nucleotide with phosphorothioate linkage
  modified_base 13: mod_base = OTHER; note = Locked thymine
  modified_base 14: mod_base = OTHER; note = Locked nucleic acid with phosphorothioate linkage
  modified_base 15: mod_base = OTHER; note = Locked nucleic acid with phosphorothioate linkage
  modified_base 16: mod_base = OTHER; note = Locked thymine
acccacttcccttcct

SEQ ID NO: 3224 - DNA, 20 bp, synthetic construct
  source 1..20: mol_type = other DNA
  modified_base 1: mod_base = OTHER; note = Locked nucleic acid with phosphorothioate linkage
  modified_base 2: mod_base = OTHER; note = 2'-O-methoxyethyl modified nucleotide
  modified_base 3: mod_base = OTHER; note = Locked nucleic acid
  modified_base 4: mod_base = OTHER; note = 2'-O-methoxyethyl modified nucleotide
  modified_base 5: mod_base = OTHER; note = Locked nucleic acid
  modified_base 6: mod_base = OTHER; note = Nucleotide with phosphorothioate linkage
  modified_base 7: mod_base = OTHER; note = Nucleotide with phosphorothioate linkage
  modified_base 8: mod_base = OTHER; note = Nucleotide with phosphorothioate linkage
  modified_base 9: mod_base = OTHER; note = Nucleotide with phosphorothioate linkage
  modified_base 10: mod_base = OTHER; note = Nucleotide with phosphorothioate linkage
  modified_base 11: mod_base = OTHER; note = Nucleotide with phosphorothioate linkage
  modified_base 12: mod_base = OTHER; note = Nucleotide with phosphorothioate linkage
  modified_base 13: mod_base = OTHER; note = Nucleotide with phosphorothioate linkage
  modified_base 14: mod_base = OTHER; note = Nucleotide with phosphorothioate linkage
  modified_base 15: mod_base = OTHER; note = 2'-O-methoxyethyl modified nucleotide
  modified_base 16: mod_base = OTHER; note = Locked thymine
  modified_base 17: mod_base = OTHER; note = 2'-O-methoxyethyl modified nucleotide
  modified_base 18: mod_base = OTHER; note = Locked nucleic acid with phosphorothioate linkage
  modified_base 19: mod_base = OTHER; note = 2'-O-methoxyethyl modified thymine with phosphorothioate linkage
  modified_base 20: mod_base = OTHER; note = Locked nucleic acid
  misc_feature 1..5: note = RNA
  misc_feature 6..14: note = DNA
  misc_feature 15..20: note = RNA
ccaagcattgcatcatcctg

SEQ ID NO: 3225 - DNA, 20 bp, synthetic construct
  source 1..20: mol_type = other DNA
  modified_base 1: mod_base = OTHER; note = Locked thymine with phosphorothioate linkage
  modified_base 2: mod_base = OTHER; note = Locked nucleic acid
  modified_base 3: mod_base = OTHER; note = Locked nucleic acid
  modified_base 4: mod_base = OTHER; note = Locked nucleic acid
  modified_base 5: mod_base = OTHER; note = Locked nucleic acid
  modified_base 6: mod_base = OTHER; note = Nucleotide with phosphorothioate linkage
  modified_base 7: mod_base = OTHER; note = Nucleotide with phosphorothioate linkage
  modified_base 8: mod_base = OTHER; note = Nucleotide with phosphorothioate linkage
  modified_base 9: mod_base = OTHER; note = Nucleotide with phosphorothioate linkage
  modified_base 10: mod_base = OTHER; note = Nucleotide with phosphorothioate linkage
  modified_base 11: mod_base = OTHER; note = Nucleotide with phosphorothioate linkage
  modified_base 12: mod_base = OTHER; note = Nucleotide with phosphorothioate linkage
  modified_base 13: mod_base = OTHER; note = Nucleotide with phosphorothioate linkage
  modified_base 14: mod_base = OTHER; note = Nucleotide with phosphorothioate linkage
  modified_base 15: mod_base = OTHER; note = Nucleotide with phosphorothioate linkage
  modified_base 16: mod_base = OTHER; note = Locked nucleic acid
  modified_base 17: mod_base = OTHER; note = Locked thymine
  modified_base 18: mod_base = OTHER; note = Locked nucleic acid with phosphorothioate linkage
  modified_base 19: mod_base = OTHER; note = Locked nucleic acid with phosphorothioate linkage
  modified_base 20: mod_base = OTHER; note = Locked thymine
tccaagcattgcatcatcct

SEQ ID NO: 3226 - DNA, 20 bp, synthetic construct
  source 1..20: mol_type = other DNA
  modified_base 1: mod_base = OTHER; note = Locked nucleic acid with phosphorothioate linkage
  modified_base 2: mod_base = OTHER; note = Locked thymine
  modified_base 3: mod_base = OTHER; note = Locked nucleic acid
  modified_base 4: mod_base = OTHER; note = Locked nucleic acid
  modified_base 5: mod_base = OTHER; note = Locked nucleic acid
  modified_base 6: mod_base = OTHER; note = Locked nucleic acid
  modified_base 7: mod_base = OTHER; note = Nucleotide with phosphorothioate linkage
  modified_base 8: mod_base = OTHER; note = Nucleotide with phosphorothioate linkage
  modified_base 9: mod_base = OTHER; note = Nucleotide with phosphorothioate linkage
  modified_base 10: mod_base = OTHER; note = Nucleotide with phosphorothioate linkage
  modified_base 11: mod_base = OTHER; note = Nucleotide with phosphorothioate linkage
  modified_base 12: mod_base = OTHER; note = Nucleotide with phosphorothioate linkage
  modified_base 13: mod_base = OTHER; note = Nucleotide with phosphorothioate linkage
  modified_base 14: mod_base = OTHER; note = Nucleotide with phosphorothioate linkage
  modified_base 15: mod_base = OTHER; note = Locked thymine
  modified_base 16: mod_base = OTHER; note = Locked nucleic acid
  modified_base 17: mod_base = OTHER; note = Locked nucleic acid
  modified_base 18: mod_base = OTHER; note = Locked thymine with phosphorothioate linkage
  modified_base 19: mod_base = OTHER; note = Locked nucleic acid with phosphorothioate linkage
  modified_base 20: mod_base = OTHER; note = Locked nucleic acid
ctccaagcattgcatcatcc

SEQ ID NO: 3227 - DNA, 16 bp, synthetic construct
  source 1..16: mol_type = other DNA
  modified_base 1: mod_base = OTHER; note = Locked nucleic acid with phosphorothioate linkage
  modified_base 2: mod_base = OTHER; note = Locked nucleic acid
  modified_base 3: mod_base = OTHER; note = Locked thymine
  modified_base 4: mod_base = OTHER; note = Nucleotide with phosphorothioate linkage
  modified_base 5: mod_base = OTHER; note = Nucleotide with phosphorothioate linkage
  modified_base 6: mod_base = OTHER; note = Nucleotide with phosphorothioate linkage
  modified_base 7: mod_base = OTHER; note = Nucleotide with phosphorothioate linkage
  modified_base 8: mod_base = OTHER; note = Nucleotide with phosphorothioate linkage
  modified_base 9: mod_base = OTHER; note = Nucleotide with phosphorothioate linkage
  modified_base 10: mod_base = OTHER; note = Nucleotide with phosphorothioate linkage
  modified_base 11: mod_base = OTHER; note = Nucleotide with phosphorothioate linkage
  modified_base 12: mod_base = OTHER; note = Nucleotide with phosphorothioate linkage
  modified_base 13: mod_base = OTHER; note = Locked nucleic acid
  modified_base 14: mod_base = OTHER; note = Locked nucleic acid with phosphorothioate linkage
  modified_base 15: mod_base = OTHER; note = Locked thymine with phosphorothioate linkage
  modified_base 16: mod_base = OTHER; note = Locked nucleic acid
cctaagaaacatactg

SEQ ID NO: 3228 - DNA, 17 bp, synthetic construct
  source 1..17: mol_type = other DNA
  modified_base 1: mod_base = OTHER; note = Locked thymine with phosphorothioate linkage
  modified_base 2: mod_base = OTHER; note = 2'-O-methoxyethyl modified nucleotide
  modified_base 3: mod_base = OTHER; note = Locked thymine
  modified_base 4: mod_base = OTHER; note = 2'-O-methoxyethyl modified thymine
  modified_base 5: mod_base = OTHER; note = Locked nucleic acid
  modified_base 6: mod_base = OTHER; note = Nucleotide with phosphorothioate linkage
  modified_base 7: mod_base = OTHER; note = Nucleotide with phosphorothioate linkage
  modified_base 8: mod_base = OTHER; note = Nucleotide with phosphorothioate linkage
  modified_base 9: mod_base = OTHER; note = Nucleotide with phosphorothioate linkage
  modified_base 10: mod_base = OTHER; note = Nucleotide with phosphorothioate linkage
  modified_base 11: mod_base = OTHER; note = Nucleotide with phosphorothioate linkage
  modified_base 12: mod_base = OTHER; note = Nucleotide with phosphorothioate linkage
  modified_base 13: mod_base = OTHER; note = Nucleotide with phosphorothioate linkage
  modified_base 14: mod_base = OTHER; note = 2'-O-methoxyethyl modified nucleotide
  modified_base 15: mod_base = OTHER; note = Locked thymine with phosphorothioate linkage
  modified_base 16: mod_base = OTHER; note = 2'-O-methoxyethyl modified nucleotide with phosphorothioate linkage
  modified_base 17: mod_base = OTHER; note = Locked thymine
  misc_feature 1..5: note = RNA
  misc_feature 6..13: note = DNA
  misc_feature 14..17: note = RNA
tattgaccctggtgtgt

SEQ ID NO: 3229 - DNA, 19 bp, synthetic construct
  source 1..19: mol_type = other DNA
  modified_base 1: mod_base = OTHER; note = Locked thymine with phosphorothioate linkage
  modified_base 2: mod_base = OTHER; note = 2'-O-methoxyethyl modified nucleotide
  modified_base 3: mod_base = OTHER; note = Locked nucleic acid
  modified_base 4: mod_base = OTHER; note = 2'-O-methoxyethyl modified nucleotide
  modified_base 5: mod_base = OTHER; note = Locked nucleic acid
  modified_base 6: mod_base = OTHER; note = Nucleotide with phosphorothioate linkage
  modified_base 7: mod_base = OTHER; note = Nucleotide with phosphorothioate linkage
  modified_base 8: mod_base = OTHER; note = Nucleotide with phosphorothioate linkage
  modified_base 9: mod_base = OTHER; note = Nucleotide with phosphorothioate linkage
  modified_base 10: mod_base = OTHER; note = Nucleotide with phosphorothioate linkage
  modified_base 11: mod_base = OTHER; note = Nucleotide with phosphorothioate linkage
  modified_base 12: mod_base = OTHER; note = Nucleotide with phosphorothioate linkage
  modified_base 13: mod_base = OTHER; note = Nucleotide with phosphorothioate linkage
  modified_base 14: mod_base = OTHER; note = Nucleotide with phosphorothioate linkage
  modified_base 15: mod_base = OTHER; note = Nucleotide with phosphorothioate linkage
  modified_base 16: mod_base = OTHER; note = 2'-O-methoxyethyl modified nucleotide
  modified_base 17: mod_base = OTHER; note = Locked nucleic acid with phosphorothioate linkage
  modified_base 18: mod_base = OTHER; note = 2'-O-methoxyethyl modified nucleotide with phosphorothioate linkage
  modified_base 19: mod_base = OTHER; note = Locked thymine
  misc_feature 1..5: note = RNA
  misc_feature 6..15: note = DNA
  misc_feature 16..19: note = RNA
tagaattggcctgggacat

SEQ ID NO: 3230 - DNA, 20 bp, synthetic construct
  source 1..20: mol_type = other DNA
  modified_base 1: mod_base = OTHER; note = 2'-O-methoxyethyl modified nucleotide with phosphorothioate linkage
  modified_base 2: mod_base = OTHER; note = 2'-O-methoxyethyl modified thymine
  modified_base 3: mod_base = OTHER; note = 2'-O-methoxyethyl modified nucleotide
  modified_base 4: mod_base = OTHER; note = 2'-O-methoxyethyl modified nucleotide
  modified_base 5: mod_base = OTHER; note = 2'-O-methoxyethyl modified nucleotide
  modified_base 6: mod_base = OTHER; note = 2'-O-methoxyethyl modified nucleotide
  modified_base 7: mod_base = OTHER; note = Nucleotide with phosphorothioate linkage
  modified_base 8: mod_base = OTHER; note = Nucleotide with phosphorothioate linkage
  modified_base 9: mod_base = OTHER; note = Nucleotide with phosphorothioate linkage
  modified_base 10: mod_base = OTHER; note = Nucleotide with phosphorothioate linkage
  modified_base 11: mod_base = OTHER; note = Nucleotide with phosphorothioate linkage
  modified_base 12: mod_base = OTHER; note = Nucleotide with phosphorothioate linkage
  modified_base 13: mod_base = OTHER; note = Nucleotide with phosphorothioate linkage
  modified_base 14: mod_base = OTHER; note = Nucleotide with phosphorothioate linkage
  modified_base 15: mod_base = OTHER; note = 2'-O-methoxyethyl modified nucleotide
  modified_base 16: mod_base = OTHER; note = 2'-O-methoxyethyl modified nucleotide
  modified_base 17: mod_base = OTHER; note = 2'-O-methoxyethyl modified nucleotide
  modified_base 18: mod_base = OTHER; note = 2'-O-methoxyethyl modified nucleotide with phosphorothioate linkage
  modified_base 19: mod_base = OTHER; note = 2'-O-methoxyethyl modified nucleotide with phosphorothioate linkage
  modified_base 20: mod_base = OTHER; note = 2'-O-methoxyethyl modified thymine
  misc_feature 1..6: note = RNA
  misc_feature 7..14: note = DNA
  misc_feature 15..20: note = RNA
ctagaattggcctgggacat

SEQ ID NO: 3231 - DNA, 20 bp, synthetic construct
  source 1..20: mol_type = other DNA
  modified_base 1: mod_base = OTHER; note = 2'-O-methoxyethyl modified nucleotide with phosphorothioate linkage
  modified_base 2: mod_base = OTHER; note = 2'-O-methoxyethyl modified thymine
  modified_base 3: mod_base = OTHER; note = 2'-O-methoxyethyl modified nucleotide
  modified_base 4: mod_base = OTHER; note = 2'-O-methoxyethyl modified nucleotide
  modified_base 5: mod_base = OTHER; note = 2'-O-methoxyethyl modified nucleotide
  modified_base 6: mod_base = OTHER; note = Nucleotide with phosphorothioate linkage
  modified_base 7: mod_base = OTHER; note = Nucleotide with phosphorothioate linkage
  modified_base 8: mod_base = OTHER; note = Nucleotide with phosphorothioate linkage
  modified_base 9: mod_base = OTHER; note = Nucleotide with phosphorothioate linkage
  modified_base 10: mod_base = OTHER; note = Nucleotide with phosphorothioate linkage
  modified_base 11: mod_base = OTHER; note = Nucleotide with phosphorothioate linkage
  modified_base 12: mod_base = OTHER; note = Nucleotide with phosphorothioate linkage
  modified_base 13: mod_base = OTHER; note = Nucleotide with phosphorothioate linkage
  modified_base 14: mod_base = OTHER; note = Nucleotide with phosphorothioate linkage
  modified_base 15: mod_base = OTHER; note = Nucleotide with phosphorothioate linkage
  modified_base 16: mod_base = OTHER; note = 2'-O-methoxyethyl modified nucleotide
  modified_base 17: mod_base = OTHER; note = 2'-O-methoxyethyl modified nucleotide
  modified_base 18: mod_base = OTHER; note = 2'-O-methoxyethyl modified thymine with phosphorothioate linkage
  modified_base 19: mod_base = OTHER; note = 2'-O-methoxyethyl modified nucleotide with phosphorothioate linkage
  modified_base 20: mod_base = OTHER; note = 2'-O-methoxyethyl modified nucleotide
  misc_feature 1..5: note = RNA
  misc_feature 6..15: note = DNA
  misc_feature 16..20: note = RNA
ctccaagcattgcatcatcc

SEQ ID NO: 3232 - DNA, 20 bp, synthetic construct
  source 1..20: mol_type = other DNA
  modified_base 1: mod_base = OTHER; note = 2'-O-methoxyethyl modified thymine with phosphorothioate linkage
  modified_base 2: mod_base = OTHER; note = 2'-O-methoxyethyl modified thymine
  modified_base 3: mod_base = OTHER; note = 2'-O-methoxyethyl modified nucleotide
  modified_base 4: mod_base = OTHER; note = 2'-O-methoxyethyl modified nucleotide
  modified_base 5: mod_base = OTHER; note = 2'-O-methoxyethyl modified nucleotide
  modified_base 6: mod_base = OTHER; note = Nucleotide with phosphorothioate linkage
  modified_base 7: mod_base = OTHER; note = Nucleotide with phosphorothioate linkage
  modified_base 8: mod_base = OTHER; note = Nucleotide with phosphorothioate linkage
  modified_base 9: mod_base = OTHER; note = Nucleotide with phosphorothioate linkage
  modified_base 10: mod_base = OTHER; note = Nucleotide with phosphorothioate linkage
  modified_base 11: mod_base = OTHER; note = Nucleotide with phosphorothioate linkage
  modified_base 12: mod_base = OTHER; note = Nucleotide with phosphorothioate linkage
  modified_base 13: mod_base = OTHER; note = Nucleotide with phosphorothioate linkage
  modified_base 14: mod_base = OTHER; note = Nucleotide with phosphorothioate linkage
  modified_base 15: mod_base = OTHER; note = Nucleotide with phosphorothioate linkage
  modified_base 16: mod_base = OTHER; note = 2'-O-methoxyethyl modified nucleotide
  modified_base 17: mod_base = OTHER; note = 2'-O-methoxyethyl modified thymine
  modified_base 18: mod_base = OTHER; note = 2'-O-methoxyethyl modified nucleotide with phosphorothioate linkage
  modified_base 19: mod_base = OTHER; note = 2'-O-methoxyethyl modified nucleotide with phosphorothioate linkage
  modified_base 20: mod_base = OTHER; note = 2'-O-methoxyethyl modified thymine
  misc_feature 1..5: note = RNA
  misc_feature 6..15: note = DNA
  misc_feature 16..20: note = RNA
ttgcacattctgtaactcct

SEQ ID NO: 3233 - DNA, 20 bp, synthetic construct
  source 1..20: mol_type = other DNA
  modified_base 1: mod_base = OTHER; note = 2'-O-methoxyethyl modified nucleotide with phosphorothioate linkage
  modified_base 2: mod_base = OTHER; note = 2'-O-methoxyethyl modified nucleotide
  modified_base 3: mod_base = OTHER; note = 2'-O-methoxyethyl modified nucleotide
  modified_base 4: mod_base = OTHER; note = 2'-O-methoxyethyl modified nucleotide
  modified_base 5: mod_base = OTHER; note = 2'-O-methoxyethyl modified nucleotide
  modified_base 6: mod_base = OTHER; note = Nucleotide with phosphorothioate linkage
  modified_base 7: mod_base = OTHER; note = Nucleotide with phosphorothioate linkage
  modified_base 8: mod_base = OTHER; note = Nucleotide with phosphorothioate linkage
  modified_base 9: mod_base = OTHER; note = Nucleotide with phosphorothioate linkage
  modified_base 10: mod_base = OTHER; note = Nucleotide with phosphorothioate linkage
  modified_base 11: mod_base = OTHER; note = Nucleotide with phosphorothioate linkage
  modified_base 12: mod_base = OTHER; note = Nucleotide with phosphorothioate linkage
  modified_base 13: mod_base = OTHER; note = Nucleotide with phosphorothioate linkage
  modified_base 14: mod_base = OTHER; note = Nucleotide with phosphorothioate linkage
  modified_base 15: mod_base = OTHER; note = 2'-O-methoxyethyl modified nucleotide
  modified_base 16: mod_base = OTHER; note = 2'-O-methoxyethyl modified thymine
  modified_base 17: mod_base = OTHER; note = 2'-O-methoxyethyl modified thymine
  modified_base 18: mod_base = OTHER; note = 2'-O-methoxyethyl modified nucleotide with phosphorothioate linkage
  modified_base 19: mod_base = OTHER; note = 2'-O-methoxyethyl modified thymine with phosphorothioate linkage
  modified_base 20: mod_base = OTHER; note = 2'-O-methoxyethyl modified nucleotide
  misc_feature 1..5: note = RNA
  misc_feature 6..14: note = DNA
  misc_feature 15..20: note = RNA
gggaaaggttgcacattctg

SEQ ID NO: 3234 - DNA, 20 bp, synthetic construct
  source 1..20: mol_type = other DNA
  modified_base 1: mod_base = OTHER; note = Locked thymine with phosphorothioate linkage
  modified_base 2: mod_base = OTHER; note = 2'-O-methoxyethyl modified nucleotide
  modified_base 3: mod_base = OTHER; note = Locked nucleic acid
  modified_base 4: mod_base = OTHER; note = 2'-O-methoxyethyl modified thymine
  modified_base 5: mod_base = OTHER; note = Locked nucleic acid
  modified_base 6: mod_base = OTHER; note = Nucleotide with phosphorothioate linkage
  modified_base 7: mod_base = OTHER; note = Nucleotide with phosphorothioate linkage
  modified_base 8: mod_base = OTHER; note = Nucleotide with phosphorothioate linkage
  modified_base 9: mod_base = OTHER; note = Nucleotide with phosphorothioate linkage
  modified_base 10: mod_base = OTHER; note = Nucleotide with phosphorothioate linkage
  modified_base 11: mod_base = OTHER; note = Nucleotide with phosphorothioate linkage
  modified_base 12: mod_base = OTHER; note = Nucleotide with phosphorothioate linkage
  modified_base 13: mod_base = OTHER; note = Nucleotide with phosphorothioate linkage
  modified_base 14: mod_base = OTHER; note = Nucleotide with phosphorothioate linkage
  modified_base 15: mod_base = OTHER; note = Nucleotide with phosphorothioate linkage
  modified_base 16: mod_base = OTHER; note = Locked thymine
  modified_base 17: mod_base = OTHER; note = 2'-O-methoxyethyl modified nucleotide
  modified_base 18: mod_base = OTHER; note = Locked nucleic acid with phosphorothioate linkage
  modified_base 19: mod_base = OTHER; note = 2'-O-methoxyethyl modified nucleotide with phosphorothioate linkage
  modified_base 20: mod_base = OTHER; note = Locked nucleic acid
  misc_feature 1..5: note = RNA
  misc_feature 6..15: note = DNA
  misc_feature 16..20: note = RNA
tcgtgccttattccttcagg

SEQ ID NO: 3235 - DNA, 19 bp, synthetic construct
  source 1..19: mol_type = other DNA
  modified_base 1: mod_base = OTHER; note = Locked nucleic acid with phosphorothioate linkage
  modified_base 2: mod_base = OTHER; note = 2'-O-methoxyethyl modified nucleotide
  modified_base 3: mod_base = OTHER; note = Locked nucleic acid
  modified_base 4: mod_base = OTHER; note = 2'-O-methoxyethyl modified nucleotide
  modified_base 5: mod_base = OTHER; note = Locked nucleic acid
  modified_base 6: mod_base = OTHER; note = Nucleotide with phosphorothioate linkage
  modified_base 7: mod_base = OTHER; note = Nucleotide with phosphorothioate linkage
  modified_base 8: mod_base = OTHER; note = Nucleotide with phosphorothioate linkage
  modified_base 9: mod_base = OTHER; note = Nucleotide with phosphorothioate linkage
  modified_base 10: mod_base = OTHER; note = Nucleotide with phosphorothioate linkage
  modified_base 11: mod_base = OTHER; note = Nucleotide with phosphorothioate linkage
  modified_base 12: mod_base = OTHER; note = Nucleotide with phosphorothioate linkage
  modified_base 13: mod_base = OTHER; note = Nucleotide with phosphorothioate linkage
  modified_base 14: mod_base = OTHER; note = Nucleotide with phosphorothioate linkage
  modified_base 15: mod_base = OTHER; note = Locked nucleic acid
  modified_base 16: mod_base = OTHER; note = 2'-O-methoxyethyl modified nucleotide
  modified_base 17: mod_base = OTHER; note = Locked nucleic acid with phosphorothioate linkage
  modified_base 18: mod_base = OTHER; note = 2'-O-methoxyethyl modified nucleotide with phosphorothioate linkage
  modified_base 19: mod_base = OTHER; note = Locked nucleic acid
  misc_feature 1..5: note = RNA
  misc_feature 6..14: note = DNA
  misc_feature 15..19: note = RNA
caagccaaagagctggaga

SEQ ID NO: 3236 - DNA, 20 bp, synthetic construct
  source 1..20: mol_type = other DNA
  modified_base 1: mod_base = OTHER; note = 2'-O-methoxyethyl modified nucleotide with phosphorothioate linkage
  modified_base 2: mod_base = OTHER; note = 2'-O-methoxyethyl modified nucleotide
  modified_base 3: mod_base = OTHER; note = 2'-O-methoxyethyl modified thymine
  modified_base 4: mod_base = OTHER; note = 2'-O-methoxyethyl modified thymine
  modified_base 5: mod_base = OTHER; note = 2'-O-methoxyethyl modified thymine
  modified_base 6: mod_base = OTHER; note = Nucleotide with phosphorothioate linkage
  modified_base 7: mod_base = OTHER; note = Nucleotide with phosphorothioate linkage
  modified_base 8: mod_base = OTHER; note = Nucleotide with phosphorothioate linkage
  modified_base 9: mod_base = OTHER; note = Nucleotide with phosphorothioate linkage
  modified_base 10: mod_base = OTHER; note = Nucleotide with phosphorothioate linkage
  modified_base 11: mod_base = OTHER; note = Nucleotide with phosphorothioate linkage
  modified_base 12: mod_base = OTHER; note = Nucleotide with phosphorothioate linkage
  modified_base 13: mod_base = OTHER; note = Nucleotide with phosphorothioate linkage
  modified_base 14: mod_base = OTHER; note = Nucleotide with phosphorothioate linkage
  modified_base 15: mod_base = OTHER; note = Nucleotide with phosphorothioate linkage
  modified_base 16: mod_base = OTHER; note = 2'-O-methoxyethyl modified nucleotide
  modified_base 17: mod_base = OTHER; note = 2'-O-methoxyethyl modified thymine
  modified_base 18: mod_base = OTHER; note = 2'-O-methoxyethyl modified thymine with phosphorothioate linkage
  modified_base 19: mod_base = OTHER; note = 2'-O-methoxyethyl modified nucleotide with phosphorothioate linkage
  modified_base 20: mod_base = OTHER; note = 2'-O-methoxyethyl modified thymine
  misc_feature 1..5: note = RNA
  misc_feature 6..15: note = DNA
  misc_feature 16..20: note = RNA
ggtttctgggctgccattat

SEQ ID NO: 3237 - DNA, 19 bp, synthetic construct
  source 1..19: mol_type = other DNA
  modified_base 1: mod_base = OTHER; note = Locked thymine with phosphorothioate linkage
  modified_base 2: mod_base = OTHER; note = 2'-O-methoxyethyl modified nucleotide
  modified_base 3: mod_base = OTHER; note = Locked thymine
  modified_base 4: mod_base = OTHER; note = 2'-O-methoxyethyl modified nucleotide
  modified_base 5: mod_base = OTHER; note = Locked nucleic acid
  modified_base 6: mod_base = OTHER; note = Nucleotide with phosphorothioate linkage
  modified_base 7: mod_base = OTHER; note = Nucleotide with phosphorothioate linkage
  modified_base 8: mod_base = OTHER; note = Nucleotide with phosphorothioate linkage
  modified_base 9: mod_base = OTHER; note = Nucleotide with phosphorothioate linkage
  modified_base 10: mod_base = OTHER; note = Nucleotide with phosphorothioate linkage
  modified_base 11: mod_base = OTHER; note = Nucleotide with phosphorothioate linkage
  modified_base 12: mod_base = OTHER; note = Nucleotide with phosphorothioate linkage
  modified_base 13: mod_base = OTHER; note = Nucleotide with phosphorothioate linkage
  modified_base 14: mod_base = OTHER; note = Nucleotide with phosphorothioate linkage
  modified_base 15: mod_base = OTHER; note = Nucleotide with phosphorothioate linkage
  modified_base 16: mod_base = OTHER; note = 2'-O-methoxyethyl modified thymine
  modified_base 17: mod_base = OTHER; note = Locked nucleic acid with phosphorothioate linkage
  modified_base 18: mod_base = OTHER; note = 2'-O-methoxyethyl modified nucleotide with phosphorothioate linkage
  modified_base 19: mod_base = OTHER; note = Locked nucleic acid
  misc_feature 1..5: note = RNA
  misc_feature 6..15: note = DNA
  misc_feature 16..19: note = RNA
tctgggagatcaccctaca

SEQ ID NO: 3238 - DNA, 20 bp, synthetic construct
  source 1..20: mol_type = other DNA
  modified_base 1: mod_base = OTHER; note = 2'-O-methoxyethyl modified nucleotide with phosphorothioate linkage
  modified_base 2: mod_base = OTHER; note = 2'-O-methoxyethyl modified nucleotide
  modified_base 3: mod_base = OTHER; note = 2'-O-methoxyethyl modified nucleotide
  modified_base 4: mod_base = OTHER; note = 2'-O-methoxyethyl modified nucleotide
  modified_base 5: mod_base = OTHER; note = 2'-O-methoxyethyl modified nucleotide
  modified_base 6: mod_base = OTHER; note = 2'-O-methoxyethyl modified nucleotide
  modified_base 7: mod_base = OTHER; note = Nucleotide with phosphorothioate linkage
  modified_base 8: mod_base = OTHER; note = Nucleotide with phosphorothioate linkage
  modified_base 9: mod_base = OTHER; note = Nucleotide with phosphorothioate linkage
  modified_base 10: mod_base = OTHER; note = Nucleotide with phosphorothioate linkage
  modified_base 11: mod_base = OTHER; note = Nucleotide with phosphorothioate linkage
  modified_base 12: mod_base = OTHER; note = Nucleotide with phosphorothioate linkage
  modified_base 13: mod_base = OTHER; note = Nucleotide with phosphorothioate linkage
  modified_base 14: mod_base = OTHER; note = Nucleotide with phosphorothioate linkage
  modified_base 15: mod_base = OTHER; note = 2'-O-methoxyethyl modified thymine
  modified_base 16: mod_base = OTHER; note = 2'-O-methoxyethyl modified nucleotide
  modified_base 17: mod_base = OTHER; note = 2'-O-methoxyethyl modified nucleotide
  modified_base 18: mod_base = OTHER; note = 2'-O-methoxyethyl modified nucleotide with phosphorothioate linkage
  modified_base 19: mod_base = OTHER; note = 2'-O-methoxyethyl modified nucleotide with phosphorothioate linkage
  modified_base 20: mod_base = OTHER; note = 2'-O-methoxyethyl modified nucleotide
  misc_feature 1..6: note = RNA
  misc_feature 7..14: note = DNA
  misc_feature 15..20: note = RNA
aaagggaagaatgctacagc

SEQ ID NO: 3239 - DNA, 20 bp, synthetic construct
  source 1..20: mol_type = other DNA
  modified_base 1: mod_base = OTHER; note = Locked nucleic acid with phosphorothioate linkage
  modified_base 2: mod_base = OTHER; note = 2'-O-methoxyethyl modified nucleotide
  modified_base 3: mod_base = OTHER; note = Locked thymine
  modified_base 4: mod_base = OTHER; note = 2'-O-methoxyethyl modified nucleotide
  modified_base 5: mod_base = OTHER; note = Locked nucleic acid
  modified_base 6: mod_base = OTHER; note = Nucleotide with phosphorothioate linkage
  modified_base 7: mod_base = OTHER; note = Nucleotide with phosphorothioate linkage
  modified_base 8: mod_base = OTHER; note = Nucleotide with phosphorothioate linkage
  modified_base 9: mod_base = OTHER; note = Nucleotide with phosphorothioate linkage
  modified_base 10: mod_base = OTHER; note = Nucleotide with phosphorothioate linkage
  modified_base 11: mod_base = OTHER; note = Nucleotide with phosphorothioate linkage
  modified_base 12: mod_base = OTHER; note = Nucleotide with phosphorothioate linkage
  modified_base 13: mod_base = OTHER; note = Nucleotide with phosphorothioate linkage
  modified_base 14: mod_base = OTHER; note = Nucleotide with phosphorothioate linkage
  modified_base 15: mod_base = OTHER; note = 2'-O-methoxyethyl modified nucleotide
  modified_base 16: mod_base = OTHER; note = Locked thymine
  modified_base 17: mod_base = OTHER; note = 2'-O-methoxyethyl modified thymine
  modified_base 18: mod_base = OTHER; note = Locked thymine with phosphorothioate linkage
  modified_base 19: mod_base = OTHER; note = 2'-O-methoxyethyl modified nucleotide with phosphorothioate linkage
  modified_base 20: mod_base = OTHER; note = Locked thymine
  misc_feature 1..5: note = RNA
  misc_feature 6..14: note = DNA
  misc_feature 15..20: note = RNA
catccagaaactacgtttgt

SEQ ID NO: 3240 - DNA, 20 bp, synthetic construct
  source 1..20: mol_type = other DNA
  modified_base 1: mod_base = OTHER; note = Locked thymine with phosphorothioate linkage
  modified_base 2: mod_base = OTHER; note = 2'-O-methoxyethyl modified nucleotide
  modified_base 3: mod_base = OTHER; note = Locked nucleic acid
  modified_base 4: mod_base = OTHER; note = 2'-O-methoxyethyl modified nucleotide
  modified_base 5: mod_base = OTHER; note = Locked thymine
  modified_base 6: mod_base = OTHER; note = Nucleotide with phosphorothioate linkage
  modified_base 7: mod_base = OTHER; note = Nucleotide with phosphorothioate linkage
  modified_base 8: mod_base = OTHER; note = Nucleotide with phosphorothioate linkage
  modified_base 9: mod_base = OTHER; note = Nucleotide with phosphorothioate linkage
  modified_base 10: mod_base = OTHER; note = Nucleotide with phosphorothioate linkage
  modified_base 11: mod_base = OTHER; note = Nucleotide with phosphorothioate linkage
  modified_base 12: mod_base = OTHER; note = Nucleotide with phosphorothioate linkage
  modified_base 13: mod_base = OTHER; note = Nucleotide with phosphorothioate linkage
  modified_base 14: mod_base = OTHER; note = Nucleotide with phosphorothioate linkage
  modified_base 15: mod_base = OTHER; note = Nucleotide with phosphorothioate linkage
  modified_base 16: mod_base = OTHER; note = Locked nucleic acid
  modified_base 17: mod_base = OTHER; note = 2'-O-methoxyethyl modified thymine
  modified_base 18: mod_base = OTHER; note = Locked nucleic acid with phosphorothioate linkage
  modified_base 19: mod_base = OTHER; note = 2'-O-methoxyethyl modified nucleotide with phosphorothioate linkage
  modified_base 20: mod_base = OTHER; note = Locked nucleic acid
  misc_feature 1..5: note = RNA
  misc_feature 6..15: note = DNA
  misc_feature 16..20: note = RNA
taaatcttgatcaaactcag

SEQ ID NO: 3241 - DNA, 20 bp, synthetic construct
  source 1..20: mol_type = other DNA
  modified_base 1: mod_base = OTHER; note = 2'-O-methoxyethyl modified nucleotide with phosphorothioate linkage
  modified_base 2: mod_base = OTHER; note = 2'-O-methoxyethyl modified thymine
  modified_base 3: mod_base = OTHER; note = 2'-O-methoxyethyl modified nucleotide
  modified_base 4: mod_base = OTHER; note = 2'-O-methoxyethyl modified thymine
  modified_base 5: mod_base = OTHER; note = 2'-O-methoxyethyl modified nucleotide
  modified_base 6: mod_base = OTHER; note = Nucleotide with phosphorothioate linkage
  modified_base 7: mod_base = OTHER; note = Nucleotide with phosphorothioate linkage
  modified_base 8: mod_base = OTHER; note = Nucleotide with phosphorothioate linkage
  modified_base 9: mod_base = OTHER; note = Nucleotide with phosphorothioate linkage
  modified_base 10: mod_base = OTHER; note = Nucleotide with phosphorothioate linkage
  modified_base 11: mod_base = OTHER; note = Nucleotide with phosphorothioate linkage
  modified_base 12: mod_base = OTHER; note = Nucleotide with phosphorothioate linkage
  modified_base 13: mod_base = OTHER; note = Nucleotide with phosphorothioate linkage
  modified_base 14: mod_base = OTHER; note = Nucleotide with phosphorothioate linkage
  modified_base 15: mod_base = OTHER; note = Nucleotide with phosphorothioate linkage
  modified_base 16: mod_base = OTHER; note = 2'-O-methoxyethyl modified thymine
  modified_base 17: mod_base = OTHER; note = 2'-O-methoxyethyl modified thymine
  modified_base 18: mod_base = OTHER; note = 2'-O-methoxyethyl modified nucleotide with phosphorothioate linkage
  modified_base 19: mod_base = OTHER; note = 2'-O-methoxyethyl modified nucleotide with phosphorothioate linkage
  modified_base 20: mod_base = OTHER; note = 2'-O-methoxyethyl modified thymine
  misc_feature 1..5: note = RNA
  misc_feature 6..15: note = DNA
  misc_feature 16..20: note = RNA
atctataggtccaagttcgt

SEQ ID NO: 3242 - DNA, 20 bp, synthetic construct
  source 1..20: mol_type = other DNA
  modified_base 1: mod_base = OTHER; note = 2'-O-methoxyethyl modified thymine with phosphorothioate linkage
  modified_base 2: mod_base = OTHER; note = 2'-O-methoxyethyl modified thymine
  modified_base 3: mod_base = OTHER; note = 2'-O-methoxyethyl modified thymine
  modified_base 4: mod_base = OTHER; note = 2'-O-methoxyethyl modified nucleotide
  modified_base 5: mod_base = OTHER; note = 2'-O-methoxyethyl modified nucleotide
  modified_base 6: mod_base = OTHER; note = Nucleotide with phosphorothioate linkage
  modified_base 7: mod_base = OTHER; note = Nucleotide with phosphorothioate linkage
  modified_base 8: mod_base = OTHER; note = Nucleotide with phosphorothioate linkage
  modified_base 9: mod_base = OTHER; note = Nucleotide with phosphorothioate linkage
  modified_base 10: mod_base = OTHER; note = Nucleotide with phosphorothioate linkage
  modified_base 11: mod_base = OTHER; note = Nucleotide with phosphorothioate linkage
  modified_base 12: mod_base = OTHER; note = Nucleotide with phosphorothioate linkage
  modified_base 13: mod_base = OTHER; note = Nucleotide with phosphorothioate linkage
  modified_base 14: mod_base = OTHER; note = Nucleotide with phosphorothioate linkage
  modified_base 15: mod_base = OTHER; note = Nucleotide with phosphorothioate linkage
  modified_base 16: mod_base = OTHER; note = 2'-O-methoxyethyl modified nucleotide
  modified_base 17: mod_base = OTHER; note = 2'-O-methoxyethyl modified nucleotide
  modified_base 18: mod_base = OTHER; note = 2'-O-methoxyethyl modified nucleotide with phosphorothioate linkage
  modified_base 19: mod_base = OTHER; note = 2'-O-methoxyethyl modified nucleotide with phosphorothioate linkage
  modified_base 20: mod_base = OTHER; note = 2'-O-methoxyethyl modified thymine
  misc_feature 1..5: note = RNA
  misc_feature 6..15: note = DNA
  misc_feature 16..20: note = RNA
tttagccacctctggcacct

SEQ ID NO: 3243 - DNA, 18 bp, synthetic construct
  source 1..18: mol_type = other DNA
  modified_base 1: mod_base = OTHER; note = Locked nucleic acid with phosphorothioate linkage
  modified_base 2: mod_base = OTHER; note = 2'-O-methoxyethyl modified thymine
  modified_base 3: mod_base = OTHER; note = Locked nucleic acid
  modified_base 4: mod_base = OTHER; note = 2'-O-methoxyethyl modified nucleotide
  modified_base 5: mod_base = OTHER; note = Nucleotide with phosphorothioate linkage
  modified_base 6: mod_base = OTHER; note = Nucleotide with phosphorothioate linkage
  modified_base 7: mod_base = OTHER; note = Nucleotide with phosphorothioate linkage
  modified_base 8: mod_base = OTHER; note = Nucleotide with phosphorothioate linkage
  modified_base 9: mod_base = OTHER; note = Nucleotide with phosphorothioate linkage
  modified_base 10: mod_base = OTHER; note = Nucleotide with phosphorothioate linkage
  modified_base 11: mod_base = OTHER; note = Nucleotide with phosphorothioate linkage
  modified_base 12: mod_base = OTHER; note = Nucleotide with phosphorothioate linkage
  modified_base 13: mod_base = OTHER; note = Nucleotide with phosphorothioate linkage
  modified_base 14: mod_base = OTHER; note = Nucleotide with phosphorothioate linkage
  modified_base 15: mod_base = OTHER; note = 2'-O-methoxyethyl modified nucleotide
  modified_base 16: mod_base = OTHER; note = Locked nucleic acid with phosphorothioate linkage
  modified_base 17: mod_base = OTHER; note = 2'-O-methoxyethyl modified nucleotide with phosphorothioate linkage
  modified_base 18: mod_base = OTHER; note = Locked nucleic acid
  misc_feature 1..4: note = RNA
  misc_feature 5..14: note = DNA
  misc_feature 15..18: note = RNA
ctagaattggcctgggac

SEQ ID NO: 3244 - DNA, 19 bp, synthetic construct
  source 1..19: mol_type = other DNA
  modified_base 1: mod_base = OTHER; note = Locked thymine with phosphorothioate linkage
  modified_base 2: mod_base = OTHER; note = 2'-O-methoxyethyl modified thymine
  modified_base 3: mod_base = OTHER; note = Locked nucleic acid
  modified_base 4: mod_base = OTHER; note = 2'-O-methoxyethyl modified nucleotide
  modified_base 5: mod_base = OTHER; note = Locked nucleic acid
  modified_base 6: mod_base = OTHER; note = Nucleotide with phosphorothioate linkage
  modified_base 7: mod_base = OTHER; note = Nucleotide with phosphorothioate linkage
  modified_base 8: mod_base = OTHER; note = Nucleotide with phosphorothioate linkage
  modified_base 9: mod_base = OTHER; note = Nucleotide with phosphorothioate linkage
  modified_base 10: mod_base = OTHER; note = Nucleotide with phosphorothioate linkage
  modified_base 11: mod_base = OTHER; note = Nucleotide with phosphorothioate linkage
  modified_base 12: mod_base = OTHER; note = Nucleotide with phosphorothioate linkage
  modified_base 13: mod_base = OTHER; note = Nucleotide with phosphorothioate linkage
  modified_base 14: mod_base = OTHER; note = Nucleotide with phosphorothioate linkage
  modified_base 15: mod_base = OTHER; note = Nucleotide with phosphorothioate linkage
  modified_base 16: mod_base = OTHER; note = 2'-O-methoxyethyl modified nucleotide
  modified_base 17: mod_base = OTHER; note = Locked nucleic acid with phosphorothioate linkage
  modified_base 18: mod_base = OTHER; note = 2'-O-methoxyethyl modified nucleotide with phosphorothioate linkage
  modified_base 19: mod_base = OTHER; note = Locked nucleic acid
  misc_feature 1..5: note = RNA
  misc_feature 6..15: note = DNA
  misc_feature 16..19: note = RNA
ttgcatcatcctggtacca

SEQ ID NO: 3245 - DNA, 20 bp, synthetic construct
  source 1..20: mol_type = other DNA
  modified_base 1: mod_base = OTHER; note = 2'-O-methoxyethyl modified nucleotide with phosphorothioate linkage
  modified_base 2: mod_base = OTHER; note = 2'-O-methoxyethyl modified nucleotide
  modified_base 3: mod_base = OTHER; note = 2'-O-methoxyethyl modified thymine
  modified_base 4: mod_base = OTHER; note = 2'-O-methoxyethyl modified nucleotide
  modified_base 5: mod_base = OTHER; note = 2'-O-methoxyethyl modified nucleotide
  modified_base 6: mod_base = OTHER; note = Nucleotide with phosphorothioate linkage
  modified_base 7: mod_base = OTHER; note = Nucleotide with phosphorothioate linkage
  modified_base 8: mod_base = OTHER; note = Nucleotide with phosphorothioate linkage
  modified_base 9: mod_base = OTHER; note = Nucleotide with phosphorothioate linkage
  modified_base 10: mod_base = OTHER; note = Nucleotide with phosphorothioate linkage
  modified_base 11: mod_base = OTHER; note = Nucleotide with phosphorothioate linkage
  modified_base 12: mod_base = OTHER; note = Nucleotide with phosphorothioate linkage
  modified_base 13: mod_base = OTHER; note = Nucleotide with phosphorothioate linkage
  modified_base 14: mod_base = OTHER; note = Nucleotide with phosphorothioate linkage
  modified_base 15: mod_base = OTHER; note = Nucleotide with phosphorothioate linkage
  modified_base 16: mod_base = OTHER; note = 2'-O-methoxyethyl modified thymine
  modified_base 17: mod_base = OTHER; note = 2'-O-methoxyethyl modified nucleotide
  modified_base 18: mod_base = OTHER; note = 2'-O-methoxyethyl modified nucleotide with phosphorothioate linkage
  modified_base 19: mod_base = OTHER; note = 2'-O-methoxyethyl modified thymine with phosphorothioate linkage
  modified_base 20: mod_base = OTHER; note = 2'-O-methoxyethyl modified nucleotide
  misc_feature 1..5: note = RNA
  misc_feature 6..15: note = DNA
  misc_feature 16..20: note = RNA
cctccaagcattgcatcatc

SEQ ID NO: 3246 - DNA, 18 bp, synthetic construct
  source 1..18: mol_type = other DNA
  modified_base 1: mod_base = OTHER; note = Locked nucleic acid with phosphorothioate linkage
  modified_base 2: mod_base = OTHER; note = 2'-O-methoxyethyl modified nucleotide
  modified_base 3: mod_base = OTHER; note = Locked nucleic acid
  modified_base 4: mod_base = OTHER; note = 2'-O-methoxyethyl modified nucleotide
  modified_base 5: mod_base = OTHER; note = Nucleotide with phosphorothioate linkage
  modified_base 6: mod_base = OTHER; note = Nucleotide with phosphorothioate linkage
  modified_base 7: mod_base = OTHER; note = Nucleotide with phosphorothioate linkage
  modified_base 8: mod_base = OTHER; note = Nucleotide with phosphorothioate linkage
  modified_base 9: mod_base = OTHER; note = Nucleotide with phosphorothioate linkage
  modified_base 10: mod_base = OTHER; note = Nucleotide with phosphorothioate linkage
  modified_base 11: mod_base = OTHER; note = Nucleotide with phosphorothioate linkage
  modified_base 12: mod_base = OTHER; note = Nucleotide with phosphorothioate linkage
  modified_base 13: mod_base = OTHER; note = Nucleotide with phosphorothioate linkage
  modified_base 14: mod_base = OTHER; note = Nucleotide with phosphorothioate linkage
  modified_base 15: mod_base = OTHER; note = 2'-O-methoxyethyl modified nucleotide
  modified_base 16: mod_base = OTHER; note = Locked nucleic acid with phosphorothioate linkage
  modified_base 17: mod_base = OTHER; note = 2'-O-methoxyethyl modified nucleotide with phosphorothioate linkage
  modified_base 18: mod_base = OTHER; note = Locked nucleic acid
  misc_feature 1..4: note = RNA
  misc_feature 5..14: note = DNA
  misc_feature 15..18: note = RNA
gagctcacagcctccaag

SEQ ID NO: 3247 - DNA, 20 bp, synthetic construct
  source 1..20: mol_type = other DNA
  modified_base 1: mod_base = OTHER; note = Locked nucleic acid with phosphorothioate linkage
  modified_base 2: mod_base = OTHER; note = Locked nucleic acid
  modified_base 3: mod_base = OTHER; note = Locked nucleic acid
  modified_base 4: mod_base = OTHER; note = Locked thymine
  modified_base 5: mod_base = OTHER; note = Locked nucleic acid
  modified_base 6: mod_base = OTHER; note = Nucleotide with phosphorothioate linkage
  modified_base 7: mod_base = OTHER; note = Nucleotide with phosphorothioate linkage
  modified_base 8: mod_base = OTHER; note = Nucleotide with phosphorothioate linkage
  modified_base 9: mod_base = OTHER; note = Nucleotide with phosphorothioate linkage
  modified_base 10: mod_base = OTHER; note = Nucleotide with phosphorothioate linkage
  modified_base 11: mod_base = OTHER; note = Nucleotide with phosphorothioate linkage
  modified_base 12: mod_base = OTHER; note = Nucleotide with phosphorothioate linkage
  modified_base 13: mod_base = OTHER; note = Nucleotide with phosphorothioate linkage
  modified_base 14: mod_base = OTHER; note = Nucleotide with phosphorothioate linkage
  modified_base 15: mod_base = OTHER; note = Nucleotide with phosphorothioate linkage
  modified_base 16: mod_base = OTHER; note = Locked nucleic acid
  modified_base 17: mod_base = OTHER; note = Locked nucleic acid
  modified_base 18: mod_base = OTHER; note = Locked nucleic acid with phosphorothioate linkage
  modified_base 19: mod_base = OTHER; note = Locked nucleic acid with phosphorothioate linkage
  modified_base 20: mod_base = OTHER; note = Locked nucleic acid
aactggagctttgtgaaacc

SEQ ID NO: 3248 - DNA, 20 bp, synthetic construct
  source 1..20: mol_type = other DNA
  modified_base 1: mod_base = OTHER; note = 2'-O-methoxyethyl modified nucleotide with phosphorothioate linkage
  modified_base 2: mod_base = OTHER; note = 2'-O-methoxyethyl modified nucleotide
  modified_base 3: mod_base = OTHER; note = 2'-O-methoxyethyl modified nucleotide
  modified_base 4: mod_base = OTHER; note = 2'-O-methoxyethyl modified nucleotide
  modified_base 5: mod_base = OTHER; note = 2'-O-methoxyethyl modified nucleotide
  modified_base 6: mod_base = OTHER; note = Nucleotide with phosphorothioate linkage
  modified_base 7: mod_base = OTHER; note = Nucleotide with phosphorothioate linkage
  modified_base 8: mod_base = OTHER; note = Nucleotide with phosphorothioate linkage
  modified_base 9: mod_base = OTHER; note = Nucleotide with phosphorothioate linkage
  modified_base 10: mod_base = OTHER; note = Nucleotide with phosphorothioate linkage
  modified_base 11: mod_base = OTHER; note = Nucleotide with phosphorothioate linkage
  modified_base 12: mod_base = OTHER; note = Nucleotide with phosphorothioate linkage
  modified_base 13: mod_base = OTHER; note = Nucleotide with phosphorothioate linkage
  modified_base 14: mod_base = OTHER; note = Nucleotide with phosphorothioate linkage
  modified_base 15: mod_base = OTHER; note = Nucleotide with phosphorothioate linkage
  modified_base 16: mod_base = OTHER; note = 2'-O-methoxyethyl modified nucleotide
  modified_base 17: mod_base = OTHER; note = 2'-O-methoxyethyl modified nucleotide
  modified_base 18: mod_base = OTHER; note = 2'-O-methoxyethyl modified nucleotide with phosphorothioate linkage
  modified_base 19: mod_base = OTHER; note = 2'-O-methoxyethyl modified thymine with phosphorothioate linkage
  modified_base 20: mod_base = OTHER; note = 2'-O-methoxyethyl modified thymine
  misc_feature 1..5: note = RNA
  misc_feature 6..15: note = DNA
  misc_feature 16..20: note = RNA
ccagggcagaactggagctt

SEQ ID NO: 3249 - DNA, 20 bp, synthetic construct
  source 1..20: mol_type = other DNA
  modified_base 1: mod_base = OTHER; note = Locked nucleic acid with phosphorothioate linkage
  modified_base 2: mod_base = OTHER; note = 2'-O-methoxyethyl modified nucleotide
  modified_base 3: mod_base = OTHER; note = Locked nucleic acid
  modified_base 4: mod_base = OTHER; note = 2'-O-methoxyethyl modified nucleotide
  modified_base 5: mod_base = OTHER; note = Locked nucleic acid
  modified_base 6: mod_base = OTHER; note = Nucleotide with phosphorothioate linkage
  modified_base 7: mod_base = OTHER; note = Nucleotide with phosphorothioate linkage
  modified_base 8: mod_base = OTHER; note = Nucleotide with phosphorothioate linkage
  modified_base 9: mod_base = OTHER; note = Nucleotide with phosphorothioate linkage
  modified_base 10: mod_base = OTHER; note = Nucleotide with phosphorothioate linkage
  modified_base 11: mod_base = OTHER; note = Nucleotide with phosphorothioate linkage
  modified_base 12: mod_base = OTHER; note = Nucleotide with phosphorothioate linkage
  modified_base 13: mod_base = OTHER; note = Nucleotide with phosphorothioate linkage
  modified_base 14: mod_base = OTHER; note = Nucleotide with phosphorothioate linkage
  modified_base 15: mod_base = OTHER; note = Nucleotide with phosphorothioate linkage
  modified_base 16: mod_base = OTHER; note = Locked nucleic acid
  modified_base 17: mod_base = OTHER; note = 2'-O-methoxyethyl modified nucleotide
  modified_base 18: mod_base = OTHER; note = Locked nucleic acid with phosphorothioate linkage
  modified_base 19: mod_base = OTHER; note = 2'-O-methoxyethyl modified nucleotide with phosphorothioate linkage
  modified_base 20: mod_base = OTHER; note = Locked nucleic acid
  misc_feature 1..5: note = RNA
  misc_feature 6..15: note = DNA
  misc_feature 16..20: note = RNA
aagggatagccctatgaggc

SEQ ID NO: 3250 - DNA, 20 bp, synthetic construct
  source 1..20: mol_type = other DNA
  modified_base 1: mod_base = OTHER; note = Locked thymine with phosphorothioate linkage
  modified_base 2: mod_base = OTHER; note = Locked thymine
  modified_base 3: mod_base = OTHER; note = Locked nucleic acid
  modified_base 4: mod_base = OTHER; note = Locked nucleic acid
  modified_base 5: mod_base = OTHER; note = Locked nucleic acid
  modified_base 6: mod_base = OTHER; note = Nucleotide with phosphorothioate linkage
  modified_base 7: mod_base = OTHER; note = Nucleotide with phosphorothioate linkage
  modified_base 8: mod_base = OTHER; note = Nucleotide with phosphorothioate linkage
  modified_base 9: mod_base = OTHER; note = Nucleotide with phosphorothioate linkage
  modified_base 10: mod_base = OTHER; note = Nucleotide with phosphorothioate linkage
  modified_base 11: mod_base = OTHER; note = Nucleotide with phosphorothioate linkage
  modified_base 12: mod_base = OTHER; note = Nucleotide with phosphorothioate linkage
  modified_base 13: mod_base = OTHER; note = Nucleotide with phosphorothioate linkage
  modified_base 14: mod_base = OTHER; note = Nucleotide with phosphorothioate linkage
  modified_base 15: mod_base = OTHER; note = Nucleotide with phosphorothioate linkage
  modified_base 16: mod_base = OTHER; note = Locked thymine
  modified_base 17: mod_base = OTHER; note = Locked nucleic acid
  modified_base 18: mod_base = OTHER; note = Locked nucleic acid with phosphorothioate linkage
  modified_base 19: mod_base = OTHER; note = Locked nucleic acid with phosphorothioate linkage
  modified_base 20: mod_base = OTHER; note = Locked nucleic acid
ttacagaatgccttgtccca

SEQ ID NO: 3251 - DNA, 18 bp, synthetic construct
  source 1..18: mol_type = other DNA
  modified_base 1: mod_base = OTHER; note = Locked thymine with phosphorothioate linkage
  modified_base 2: mod_base = OTHER; note = Locked nucleic acid
  modified_base 3: mod_base = OTHER; note = Locked nucleic acid
  modified_base 4: mod_base = OTHER; note = Locked nucleic acid
  modified_base 5: mod_base = OTHER; note = Nucleotide with phosphorothioate linkage
  modified_base 6: mod_base = OTHER; note = Nucleotide with phosphorothioate linkage
  modified_base 7: mod_base = OTHER; note = Nucleotide with phosphorothioate linkage
  modified_base 8: mod_base = OTHER; note = Nucleotide with phosphorothioate linkage
  modified_base 9: mod_base = OTHER; note = Nucleotide with phosphorothioate linkage
  modified_base 10: mod_base = OTHER; note = Nucleotide with phosphorothioate linkage
  modified_base 11: mod_base = OTHER; note = Nucleotide with phosphorothioate linkage
  modified_base 12: mod_base = OTHER; note = Nucleotide with phosphorothioate linkage
  modified_base 13: mod_base = OTHER; note = Nucleotide with phosphorothioate linkage
  modified_base 14: mod_base = OTHER; note = Nucleotide with phosphorothioate linkage
  modified_base 15: mod_base = OTHER; note = Locked nucleic acid
  modified_base 16: mod_base = OTHER; note = Locked nucleic acid with phosphorothioate linkage
  modified_base 17: mod_base = OTHER; note = Locked nucleic acid with phosphorothioate linkage
  modified_base 18: mod_base = OTHER; note = Locked nucleic acid
taagcaatggaagtccaa

SEQ ID NO: 3252 - DNA, 19 bp, synthetic construct
  source 1..19: mol_type = other DNA
  modified_base 1: mod_base = OTHER; note = Locked nucleic acid with phosphorothioate linkage
  modified_base 2: mod_base = OTHER; note = 2'-O-methoxyethyl modified nucleotide
  modified_base 3: mod_base = OTHER; note = Locked nucleic acid
  modified_base 4: mod_base = OTHER; note = 2'-O-methoxyethyl modified nucleotide
  modified_base 5: mod_base = OTHER; note = Locked nucleic acid
  modified_base 6: mod_base = OTHER; note = 2'-O-methoxyethyl modified nucleotide
  modified_base 7: mod_base = OTHER; note = Nucleotide with phosphorothioate linkage
  modified_base 8: mod_base = OTHER; note = Nucleotide with phosphorothioate linkage
  modified_base 9: mod_base = OTHER; note = Nucleotide with phosphorothioate linkage
  modified_base 10: mod_base = OTHER; note = Nucleotide with phosphorothioate linkage
  modified_base 11: mod_base = OTHER; note = Nucleotide with phosphorothioate linkage
  modified_base 12: mod_base = OTHER; note = Nucleotide with phosphorothioate linkage
  modified_base 13: mod_base = OTHER; note = Nucleotide with phosphorothioate linkage
  modified_base 14: mod_base = OTHER; note = Nucleotide with phosphorothioate linkage
  modified_base 15: mod_base = OTHER; note = Locked nucleic acid
  modified_base 16: mod_base = OTHER; note = 2'-O-methoxyethyl modified nucleotide
  modified_base 17: mod_base = OTHER; note = Locked nucleic acid with phosphorothioate linkage
  modified_base 18: mod_base = OTHER; note = 2'-O-methoxyethyl modified nucleotide with phosphorothioate linkage
  modified_base 19: mod_base = OTHER; note = Locked nucleic acid
  misc_feature 1..6: note = RNA
  misc_feature 7..14: note = DNA
  misc_feature 15..19: note = RNA
cccagaaaaccagaaccgg

SEQ ID NO: 3253 - DNA, 18 bp, synthetic construct
  source 1..18: mol_type = other DNA
  modified_base 1: mod_base = OTHER; note = Locked nucleic acid with phosphorothioate linkage
  modified_base 2: mod_base = OTHER; note = Locked thymine
  modified_base 3: mod_base = OTHER; note = Locked nucleic acid
  modified_base 4: mod_base = OTHER; note = Locked nucleic acid
  modified_base 5: mod_base = OTHER; note = Locked nucleic acid
  modified_base 6: mod_base = OTHER; note = Nucleotide with phosphorothioate linkage
  modified_base 7: mod_base = OTHER; note = Nucleotide with phosphorothioate linkage
  modified_base 8: mod_base = OTHER; note = Nucleotide with phosphorothioate linkage
  modified_base 9: mod_base = OTHER; note = Nucleotide with phosphorothioate linkage
  modified_base 10: mod_base = OTHER; note = Nucleotide with phosphorothioate linkage
  modified_base 11: mod_base = OTHER; note = Nucleotide with phosphorothioate linkage
  modified_base 12: mod_base = OTHER; note = Nucleotide with phosphorothioate linkage
  modified_base 13: mod_base = OTHER; note = Nucleotide with phosphorothioate linkage
  modified_base 14: mod_base = OTHER; note = Locked nucleic acid
  modified_base 15: mod_base = OTHER; note = Locked nucleic acid
  modified_base 16: mod_base = OTHER; note = Locked nucleic acid with phosphorothioate linkage
  modified_base 17: mod_base = OTHER; note = Locked nucleic acid with phosphorothioate linkage
  modified_base 18: mod_base = OTHER; note = Locked nucleic acid
atcccagaaaaccagaac

SEQ ID NO: 3254 - DNA, 17 bp, synthetic construct
  source 1..17: mol_type = other DNA
  modified_base 1: mod_base = OTHER; note = Locked nucleic acid with phosphorothioate linkage
  modified_base 2: mod_base = OTHER; note = Locked nucleic acid
  modified_base 3: mod_base = OTHER; note = Locked nucleic acid
  modified_base 4: mod_base = OTHER; note = Locked thymine
  modified_base 5: mod_base = OTHER; note = Nucleotide with phosphorothioate linkage
  modified_base 6: mod_base = OTHER; note = Nucleotide with phosphorothioate linkage
  modified_base 7: mod_base = OTHER; note = Nucleotide with phosphorothioate linkage
  modified_base 8: mod_base = OTHER; note = Nucleotide with phosphorothioate linkage
  modified_base 9: mod_base = OTHER; note = Nucleotide with phosphorothioate linkage
  modified_base 10: mod_base = OTHER; note = Nucleotide with phosphorothioate linkage
  modified_base 11: mod_base = OTHER; note = Nucleotide with phosphorothioate linkage
  modified_base 12: mod_base = OTHER; note = Nucleotide with phosphorothioate linkage
  modified_base 13: mod_base = OTHER; note = Nucleotide with phosphorothioate linkage
  modified_base 14: mod_base = OTHER; note = Nucleotide with phosphorothioate linkage
  modified_base 15: mod_base = OTHER; note = Locked nucleic acid with phosphorothioate linkage
  modified_base 16: mod_base = OTHER; note = Locked thymine with phosphorothioate linkage
  modified_base 17: mod_base = OTHER; note = Locked nucleic acid
acctaagaaacatactg

SEQ ID NO: 3255 - DNA, 18 bp, synthetic construct
  source 1..18: mol_type = other DNA
  modified_base 1: mod_base = OTHER; note = Locked nucleic acid with phosphorothioate linkage
  modified_base 2: mod_base = OTHER; note = 2'-O-methoxyethyl modified thymine
  modified_base 3: mod_base = OTHER; note = Locked nucleic acid
  modified_base 4: mod_base = OTHER; note = 2'-O-methoxyethyl modified nucleotide
  modified_base 5: mod_base = OTHER; note = Locked nucleic acid
  modified_base 6: mod_base = OTHER; note = Nucleotide with phosphorothioate linkage
  modified_base 7: mod_base = OTHER; note = Nucleotide with phosphorothioate linkage
  modified_base 8: mod_base = OTHER; note = Nucleotide with phosphorothioate linkage
  modified_base 9: mod_base = OTHER; note = Nucleotide with phosphorothioate linkage
  modified_base 10: mod_base = OTHER; note = Nucleotide with phosphorothioate linkage
  modified_base 11: mod_base = OTHER; note = Nucleotide with phosphorothioate linkage
  modified_base 12: mod_base = OTHER; note = Nucleotide with phosphorothioate linkage
  modified_base 13: mod_base = OTHER; note = Nucleotide with phosphorothioate linkage
  modified_base 14: mod_base = OTHER; note = Locked nucleic acid
  modified_base 15: mod_base = OTHER; note = 2'-O-methoxyethyl modified thymine
  modified_base 16: mod_base = OTHER; note = Locked nucleic acid with phosphorothioate linkage
  modified_base 17: mod_base = OTHER; note = 2'-O-methoxyethyl modified thymine with phosphorothioate linkage
  modified_base 18: mod_base = OTHER; note = Locked thymine
  misc_feature 1..5: note = RNA
  misc_feature 6..13: note = DNA
  misc_feature 14..18: note = RNA
ctaaattacaagggtgtt

SEQ ID NO: 3256 - DNA, 18 bp, synthetic construct
  source 1..18: mol_type = other DNA
  modified_base 1: mod_base = OTHER; note = 2'-O-methoxyethyl modified thymine with phosphorothioate linkage
  modified_base 2: mod_base = OTHER; note = 2'-O-methoxyethyl modified nucleotide
  modified_base 3: mod_base = OTHER; note = 2'-O-methoxyethyl modified thymine
  modified_base 4: mod_base = OTHER; note = 2'-O-methoxyethyl modified nucleotide
  modified_base 5: mod_base = OTHER; note = 2'-O-methoxyethyl modified nucleotide
  modified_base 6: mod_base = OTHER; note = Nucleotide with phosphorothioate linkage
  modified_base 7: mod_base = OTHER; note = Nucleotide with phosphorothioate linkage
  modified_base 8: mod_base = OTHER; note = Nucleotide with phosphorothioate linkage
  modified_base 9: mod_base = OTHER; note = Nucleotide with phosphorothioate linkage
  modified_base 10: mod_base = OTHER; note = Nucleotide with phosphorothioate linkage
  modified_base 11: mod_base = OTHER; note = Nucleotide with phosphorothioate linkage
  modified_base 12: mod_base = OTHER; note = Nucleotide with phosphorothioate linkage
  modified_base 13: mod_base = OTHER; note = Nucleotide with phosphorothioate linkage
  modified_base 14: mod_base = OTHER; note = 2'-O-methoxyethyl modified nucleotide
  modified_base 15: mod_base = OTHER; note = 2'-O-methoxyethyl modified nucleotide
  modified_base 16: mod_base = OTHER; note = 2'-O-methoxyethyl modified thymine with phosphorothioate linkage
  modified_base 17: mod_base = OTHER; note = 2'-O-methoxyethyl modified nucleotide with phosphorothioate linkage
  modified_base 18: mod_base = OTHER; note = 2'-O-methoxyethyl modified thymine
  misc_feature 1..5: note = RNA
  misc_feature 6..13: note = DNA
  misc_feature 14..18: note = RNA
tctaaattacaagggtgt

SEQ ID NO: 3257 - DNA, 18 bp, synthetic construct
  source 1..18: mol_type = other DNA
  modified_base 1: mod_base = OTHER; note = Locked thymine with phosphorothioate linkage
  modified_base 2: mod_base = OTHER; note = 2'-O-methoxyethyl modified nucleotide
  modified_base 3: mod_base = OTHER; note = Locked thymine
  modified_base 4: mod_base = OTHER; note = 2'-O-methoxyethyl modified nucleotide
  modified_base 5: mod_base = OTHER; note = Nucleotide with phosphorothioate linkage
  modified_base 6: mod_base = OTHER; note = Nucleotide with phosphorothioate linkage
  modified_base 7: mod_base = OTHER; note = Nucleotide with phosphorothioate linkage
  modified_base 8: mod_base = OTHER; note = Nucleotide with phosphorothioate linkage
  modified_base 9: mod_base = OTHER; note = Nucleotide with phosphorothioate linkage
  modified_base 10: mod_base = OTHER; note = Nucleotide with phosphorothioate linkage
  modified_base 11: mod_base = OTHER; note = Nucleotide with phosphorothioate linkage
  modified_base 12: mod_base = OTHER; note = Nucleotide with phosphorothioate linkage
  modified_base 13: mod_base = OTHER; note = Nucleotide with phosphorothioate linkage
  modified_base 14: mod_base = OTHER; note = Nucleotide with phosphorothioate linkage
  modified_base 15: mod_base = OTHER; note = 2'-O-methoxyethyl modified nucleotide
  modified_base 16: mod_base = OTHER; note = Locked thymine with phosphorothioate linkage
  modified_base 17: mod_base = OTHER; note = 2'-O-methoxyethyl modified nucleotide with phosphorothioate linkage
  modified_base 18: mod_base = OTHER; note = Locked nucleic acid
  misc_feature 1..4: note = RNA
  misc_feature 5..14: note = DNA
  misc_feature 15..18: note = RNA
tgtaattccaggctctaa

SEQ ID NO: 3258 - DNA, 18 bp, synthetic construct
  source 1..18: mol_type = other DNA
  modified_base 1: mod_base = OTHER; note = Locked nucleic acid with phosphorothioate linkage
  modified_base 2: mod_base = OTHER; note = Locked thymine
  modified_base 3: mod_base = OTHER; note = Locked nucleic acid
  modified_base 4: mod_base = OTHER; note = Locked thymine
  modified_base 5: mod_base = OTHER; note = Nucleotide with phosphorothioate linkage
  modified_base 6: mod_base = OTHER; note = Nucleotide with phosphorothioate linkage
  modified_base 7: mod_base = OTHER; note = Nucleotide with phosphorothioate linkage
  modified_base 8: mod_base = OTHER; note = Nucleotide with phosphorothioate linkage
  modified_base 9: mod_base = OTHER; note = Nucleotide with phosphorothioate linkage
  modified_base 10: mod_base = OTHER; note = Nucleotide with phosphorothioate linkage
  modified_base 11: mod_base = OTHER; note = Nucleotide with phosphorothioate linkage
  modified_base 12: mod_base = OTHER; note = Nucleotide with phosphorothioate linkage
  modified_base 13: mod_base = OTHER; note = Nucleotide with phosphorothioate linkage
  modified_base 14: mod_base = OTHER; note = Nucleotide with phosphorothioate linkage
  modified_base 15: mod_base = OTHER; note = Locked nucleic acid
  modified_base 16: mod_base = OTHER; note = Locked thymine with phosphorothioate linkage
  modified_base 17: mod_base = OTHER; note = Locked thymine with phosphorothioate linkage
  modified_base 18: mod_base = OTHER; note = Locked nucleic acid
gtctagctgccttcctta

SEQ ID NO: 3259 - DNA, 18 bp, synthetic construct
  source 1..18: mol_type = other DNA
  modified_base 1: mod_base = OTHER; note = Locked nucleic acid with phosphorothioate linkage
  modified_base 2: mod_base = OTHER; note = Locked nucleic acid
  modified_base 3: mod_base = OTHER; note = Locked thymine
  modified_base 4: mod_base = OTHER; note = Locked nucleic acid
  modified_base 5: mod_base = OTHER; note = Nucleotide with phosphorothioate linkage
  modified_base 6: mod_base = OTHER; note = Nucleotide with phosphorothioate linkage
  modified_base 7: mod_base = OTHER; note = Nucleotide with phosphorothioate linkage
  modified_base 8: mod_base = OTHER; note = Nucleotide with phosphorothioate linkage
  modified_base 9: mod_base = OTHER; note = Nucleotide with phosphorothioate linkage
  modified_base 10: mod_base = OTHER; note = Nucleotide with phosphorothioate linkage
  modified_base 11: mod_base = OTHER; note = Nucleotide with phosphorothioate linkage
  modified_base 12: mod_base = OTHER; note = Nucleotide with phosphorothioate linkage
  modified_base 13: mod_base = OTHER; note = Nucleotide with phosphorothioate linkage
  modified_base 14: mod_base = OTHER; note = Nucleotide with phosphorothioate linkage
  modified_base 15: mod_base = OTHER; note = Locked thymine
  modified_base 16: mod_base = OTHER; note = Locked thymine with phosphorothioate linkage
  modified_base 17: mod_base = OTHER; note = Locked nucleic acid with phosphorothioate linkage
  modified_base 18: mod_base = OTHER; note = Locked nucleic acid
cctgtctagctgccttcc

SEQ ID NO: 3260 - DNA, 20 bp, synthetic construct
  source 1..20: mol_type = other DNA
  modified_base 1: mod_base = OTHER; note = Locked nucleic acid with phosphorothioate linkage
  modified_base 2: mod_base = OTHER; note = 2'-O-methoxyethyl modified nucleotide
  modified_base 3: mod_base = OTHER; note = Locked thymine
  modified_base 4: mod_base = OTHER; note = 2'-O-methoxyethyl modified nucleotide
  modified_base 5: mod_base = OTHER; note = Locked thymine
  modified_base 6: mod_base = OTHER; note = Nucleotide with phosphorothioate linkage
  modified_base 7: mod_base = OTHER; note = Nucleotide with phosphorothioate linkage
  modified_base 8: mod_base = OTHER; note = Nucleotide with phosphorothioate linkage
  modified_base 9: mod_base = OTHER; note = Nucleotide with phosphorothioate linkage
  modified_base 10: mod_base = OTHER; note = Nucleotide with phosphorothioate linkage
  modified_base 11: mod_base = OTHER; note = Nucleotide with phosphorothioate linkage
  modified_base 12: mod_base = OTHER; note = Nucleotide with phosphorothioate linkage
  modified_base 13: mod_base = OTHER; note = Nucleotide with phosphorothioate linkage
  modified_base 14: mod_base = OTHER; note = Nucleotide with phosphorothioate linkage
  modified_base 15: mod_base = OTHER; note = Nucleotide with phosphorothioate linkage
  modified_base 16: mod_base = OTHER; note = Locked thymine
  modified_base 17: mod_base = OTHER; note = 2'-O-methoxyethyl modified thymine
  modified_base 18: mod_base = OTHER; note = Locked nucleic acid with phosphorothioate linkage
  modified_base 19: mod_base = OTHER; note = 2'-O-methoxyethyl modified thymine with phosphorothioate linkage
  modified_base 20: mod_base = OTHER; note = Locked nucleic acid
  misc_feature 1..5: note = RNA
  misc_feature 6..15: note = DNA
  misc_feature 16..20: note = RNA
gctatctgctcttacttatg

SEQ ID NO: 3261 - DNA, 19 bp, synthetic construct
  source 1..19: mol_type = other DNA
  modified_base 1: mod_base = OTHER; note = Locked nucleic acid with phosphorothioate linkage
  modified_base 2: mod_base = OTHER; note = Locked nucleic acid
  modified_base 3: mod_base = OTHER; note = Locked thymine
  modified_base 4: mod_base = OTHER; note = Locked nucleic acid
  modified_base 5: mod_base = OTHER; note = Locked thymine
  modified_base 6: mod_base = OTHER; note = Nucleotide with phosphorothioate linkage
  modified_base 7: mod_base = OTHER; note = Nucleotide with phosphorothioate linkage
  modified_base 8: mod_base = OTHER; note = Nucleotide with phosphorothioate linkage
  modified_base 9: mod_base = OTHER; note = Nucleotide with phosphorothioate linkage
  modified_base 10: mod_base = OTHER; note = Nucleotide with phosphorothioate linkage
  modified_base 11: mod_base = OTHER; note = Nucleotide with phosphorothioate linkage
  modified_base 12: mod_base = OTHER; note = Nucleotide with phosphorothioate linkage
  modified_base 13: mod_base = OTHER; note = Nucleotide with phosphorothioate linkage
  modified_base 14: mod_base = OTHER; note = Nucleotide with phosphorothioate linkage
  modified_base 15: mod_base = OTHER; note = Nucleotide with phosphorothioate linkage
  modified_base 16: mod_base = OTHER; note = Locked thymine
  modified_base 17: mod_base = OTHER; note = Locked thymine with phosphorothioate linkage
  modified_base 18: mod_base = OTHER; note = Locked nucleic acid with phosphorothioate linkage
  modified_base 19: mod_base = OTHER; note = Locked thymine
gctatctgctcttacttat

SEQ ID NO: 3262 - DNA, 17 bp, synthetic construct
  source 1..17: mol_type = other DNA
  modified_base 1: mod_base = OTHER; note = Locked thymine with phosphorothioate linkage
  modified_base 2: mod_base = OTHER; note = Locked nucleic acid
  modified_base 3: mod_base = OTHER; note = Locked thymine
  modified_base 4: mod_base = OTHER; note = Locked thymine
  modified_base 5: mod_base = OTHER; note = Nucleotide with phosphorothioate linkage
  modified_base 6: mod_base = OTHER; note = Nucleotide with phosphorothioate linkage
  modified_base 7: mod_base = OTHER; note = Nucleotide with phosphorothioate linkage
  modified_base 8: mod_base = OTHER; note = Nucleotide with phosphorothioate linkage
  modified_base 9: mod_base = OTHER; note = Nucleotide with phosphorothioate linkage
  modified_base 10: mod_base = OTHER; note = Nucleotide with phosphorothioate linkage
  modified_base 11: mod_base = OTHER; note = Nucleotide with phosphorothioate linkage
  modified_base 12: mod_base = OTHER; note = Nucleotide with phosphorothioate linkage
  modified_base 13: mod_base = OTHER; note = Nucleotide with phosphorothioate linkage
  modified_base 14: mod_base = OTHER; note = Locked nucleic acid
  modified_base 15: mod_base = OTHER; note = Locked nucleic acid with phosphorothioate linkage
  modified_base 16: mod_base = OTHER; note = Locked nucleic acid with phosphorothioate linkage
  modified_base 17: mod_base = OTHER; note = Locked thymine
tattacctgtatggact

SEQ ID NO: 3263 - DNA, 18 bp, synthetic construct
  source 1..18: mol_type = other DNA
  modified_base 1: mod_base = OTHER; note = Locked nucleic acid with phosphorothioate linkage
  modified_base 2: mod_base = OTHER; note = 2'-O-methoxyethyl modified nucleotide
  modified_base 3: mod_base = OTHER; note = Locked nucleic acid
  modified_base 4: mod_base = OTHER; note = 2'-O-methoxyethyl modified nucleotide
  modified_base 5: mod_base = OTHER; note = Nucleotide with phosphorothioate linkage
  modified_base 6: mod_base = OTHER; note = Nucleotide with phosphorothioate linkage
  modified_base 7: mod_base = OTHER; note = Nucleotide with phosphorothioate linkage
  modified_base 8: mod_base = OTHER; note = Nucleotide with phosphorothioate linkage
  modified_base 9: mod_base = OTHER; note = Nucleotide with phosphorothioate linkage
  modified_base 10: mod_base = OTHER; note = Nucleotide with phosphorothioate linkage
  modified_base 11: mod_base = OTHER; note = Nucleotide with phosphorothioate linkage
  modified_base 12: mod_base = OTHER; note = Nucleotide with phosphorothioate linkage
  modified_base 13: mod_base = OTHER; note = Nucleotide with phosphorothioate linkage
  modified_base 14: mod_base = OTHER; note = Nucleotide with phosphorothioate linkage
  modified_base 15: mod_base = OTHER; note = 2'-O-methoxyethyl modified thymine
  modified_base 16: mod_base = OTHER; note = Locked nucleic acid with phosphorothioate linkage
  modified_base 17: mod_base = OTHER; note = 2'-O-methoxyethyl modified thymine with phosphorothioate linkage
  modified_base 18: mod_base = OTHER; note = Locked nucleic acid
  misc_feature 1..4: note = RNA
  misc_feature 5..14: note = DNA
  misc_feature 15..18: note = RNA
accctggtgtgttatgtc

SEQ ID NO: 3264 - DNA, 20 bp, synthetic construct
  source 1..20: mol_type = other DNA
  modified_base 1: mod_base = OTHER; note = Locked thymine with phosphorothioate linkage
  modified_base 2: mod_base = OTHER; note = 2'-O-methoxyethyl modified nucleotide
  modified_base 3: mod_base = OTHER; note = Locked nucleic acid
  modified_base 4: mod_base = OTHER; note = 2'-O-methoxyethyl modified nucleotide
  modified_base 5: mod_base = OTHER; note = Locked thymine
  modified_base 6: mod_base = OTHER; note = Nucleotide with phosphorothioate linkage
  modified_base 7: mod_base = OTHER; note = Nucleotide with phosphorothioate linkage
  modified_base 8: mod_base = OTHER; note = Nucleotide with phosphorothioate linkage
  modified_base 9: mod_base = OTHER; note = Nucleotide with phosphorothioate linkage
  modified_base 10: mod_base = OTHER; note = Nucleotide with phosphorothioate linkage
  modified_base 11: mod_base = OTHER; note = Nucleotide with phosphorothioate linkage
  modified_base 12: mod_base = OTHER; note = Nucleotide with phosphorothioate linkage
  modified_base 13: mod_base = OTHER; note = Nucleotide with phosphorothioate linkage
  modified_base 14: mod_base = OTHER; note = Nucleotide with phosphorothioate linkage
  modified_base 15: mod_base = OTHER; note = Nucleotide with phosphorothioate linkage
  modified_base 16: mod_base = OTHER; note = Locked nucleic acid
  modified_base 17: mod_base = OTHER; note = 2'-O-methoxyethyl modified thymine
  modified_base 18: mod_base = OTHER; note = Locked thymine with phosphorothioate linkage
  modified_base 19: mod_base = OTHER; note = 2'-O-methoxyethyl modified nucleotide with phosphorothioate linkage
  modified_base 20: mod_base = OTHER; note = Locked nucleic acid
  misc_feature 1..5: note = RNA
  misc_feature 6..15: note = DNA
  misc_feature 16..20: note = RNA
tagcttcaaagttgtattga

SEQ ID NO: 3265 - DNA, 19 bp, synthetic construct
  source 1..19: mol_type = other DNA
  modified_base 1: mod_base = OTHER; note = Locked nucleic acid with phosphorothioate linkage
  modified_base 2: mod_base = OTHER; note = 2'-O-methoxyethyl modified nucleotide
  modified_base 3: mod_base = OTHER; note = Locked nucleic acid
  modified_base 4: mod_base = OTHER; note = 2'-O-methoxyethyl modified nucleotide
  modified_base 5: mod_base = OTHER; note = Locked nucleic acid
  modified_base 6: mod_base = OTHER; note = Nucleotide with phosphorothioate linkage
  modified_base 7: mod_base = OTHER; note = Nucleotide with phosphorothioate linkage
  modified_base 8: mod_base = OTHER; note = Nucleotide with phosphorothioate linkage
  modified_base 9: mod_base = OTHER; note = Nucleotide with phosphorothioate linkage
  modified_base 10: mod_base = OTHER; note = Nucleotide with phosphorothioate linkage
  modified_base 11: mod_base = OTHER; note = Nucleotide with phosphorothioate linkage
  modified_base 12: mod_base = OTHER; note = Nucleotide with phosphorothioate linkage
  modified_base 13: mod_base = OTHER; note = Nucleotide with phosphorothioate linkage
  modified_base 14: mod_base = OTHER; note = Nucleotide with phosphorothioate linkage
  modified_base 15: mod_base = OTHER; note = Locked nucleic acid
  modified_base 16: mod_base = OTHER; note = 2'-O-methoxyethyl modified nucleotide
  modified_base 17: mod_base = OTHER; note = Locked nucleic acid with phosphorothioate linkage
  modified_base 18: mod_base = OTHER; note = 2'-O-methoxyethyl modified nucleotide with phosphorothioate linkage
  modified_base 19: mod_base = OTHER; note = Locked nucleic acid
  misc_feature 1..5: note = RNA
  misc_feature 6..14: note = DNA
  misc_feature 15..19: note = RNA
agagggaatctggagagga

SEQ ID NO: 3266 - DNA, 18 bp, synthetic construct
  source 1..18: mol_type = other DNA
  modified_base 1: mod_base = OTHER; note = Locked nucleic acid with phosphorothioate linkage
  modified_base 2: mod_base = OTHER; note = 2'-O-methoxyethyl modified nucleotide
  modified_base 3: mod_base = OTHER; note = Locked thymine
  modified_base 4: mod_base = OTHER; note = 2'-O-methoxyethyl modified thymine
  modified_base 5: mod_base = OTHER; note = Nucleotide with phosphorothioate linkage
  modified_base 6: mod_base = OTHER; note = Nucleotide with phosphorothioate linkage
  modified_base 7: mod_base = OTHER; note = Nucleotide with phosphorothioate linkage
  modified_base 8: mod_base = OTHER; note = Nucleotide with phosphorothioate linkage
  modified_base 9: mod_base = OTHER; note = Nucleotide with phosphorothioate linkage
  modified_base 10: mod_base = OTHER; note = Nucleotide with phosphorothioate linkage
  modified_base 11: mod_base = OTHER; note = Nucleotide with phosphorothioate linkage
  modified_base 12: mod_base = OTHER; note = Nucleotide with phosphorothioate linkage
  modified_base 13: mod_base = OTHER; note = Nucleotide with phosphorothioate linkage
  modified_base 14: mod_base = OTHER; note = Nucleotide with phosphorothioate linkage
  modified_base 15: mod_base = OTHER; note = 2'-O-methoxyethyl modified nucleotide
  modified_base 16: mod_base = OTHER; note = Locked thymine with phosphorothioate linkage
  modified_base 17: mod_base = OTHER; note = 2'-O-methoxyethyl modified nucleotide with phosphorothioate linkage
  modified_base 18: mod_base = OTHER; note = Locked nucleic acid
  misc_feature 1..4: note = RNA
  misc_feature 5..14: note = DNA
  misc_feature 15..18: note = RNA
aattgagagggaatctgg

SEQ ID NO: 3267 - DNA, 16 bp, synthetic construct
  source 1..16: mol_type = other DNA
  modified_base 1: mod_base = OTHER; note = Locked nucleic acid with phosphorothioate linkage
  modified_base 2: mod_base = OTHER; note = 2'-O-methoxyethyl modified thymine
  modified_base 3: mod_base = OTHER; note = Locked nucleic acid
  modified_base 4: mod_base = OTHER; note = 2'-O-methoxyethyl modified nucleotide
  modified_base 5: mod_base = OTHER; note = Nucleotide with phosphorothioate linkage
  modified_base 6: mod_base = OTHER; note = Nucleotide with phosphorothioate linkage
  modified_base 7: mod_base = OTHER; note = Nucleotide with phosphorothioate linkage
  modified_base 8: mod_base = OTHER; note = Nucleotide with phosphorothioate linkage
  modified_base 9: mod_base = OTHER; note = Nucleotide with phosphorothioate linkage
  modified_base 10: mod_base = OTHER; note = Nucleotide with phosphorothioate linkage
  modified_base 11: mod_base = OTHER; note = Nucleotide with phosphorothioate linkage
  modified_base 12: mod_base = OTHER; note = Nucleotide with phosphorothioate linkage
  modified_base 13: mod_base = OTHER; note = 2'-O-methoxyethyl modified nucleotide
  modified_base 14: mod_base = OTHER; note = Locked nucleic acid with phosphorothioate linkage
  modified_base 15: mod_base = OTHER; note = 2'-O-methoxyethyl modified nucleotide with phosphorothioate linkage
  modified_base 16: mod_base = OTHER; note = Locked nucleic acid
  misc_feature 1..4: note = RNA
  misc_feature 5..12: note = DNA
  misc_feature 13..16: note = RNA
gtggccaggtaggacc

SEQ ID NO: 3268 - DNA, 16 bp, synthetic construct
  source 1..16: mol_type = other DNA
  modified_base 1: mod_base = OTHER; note = Locked nucleic acid with phosphorothioate linkage
  modified_base 2: mod_base = OTHER; note = 2'-O-methoxyethyl modified thymine
  modified_base 3: mod_base = OTHER; note = Locked nucleic acid
  modified_base 4: mod_base = OTHER; note = Nucleotide with phosphorothioate linkage
  modified_base 5: mod_base = OTHER; note = Nucleotide with phosphorothioate linkage
  modified_base 6: mod_base = OTHER; note = Nucleotide with phosphorothioate linkage
  modified_base 7: mod_base = OTHER; note = Nucleotide with phosphorothioate linkage
  modified_base 8: mod_base = OTHER; note = Nucleotide with phosphorothioate linkage
  modified_base 9: mod_base = OTHER; note = Nucleotide with phosphorothioate linkage
  modified_base 10: mod_base = OTHER; note = Nucleotide with phosphorothioate linkage
  modified_base 11: mod_base = OTHER; note = Nucleotide with phosphorothioate linkage
  modified_base 12: mod_base = OTHER; note = Nucleotide with phosphorothioate linkage
  modified_base 13: mod_base = OTHER; note = 2'-O-methoxyethyl modified nucleotide
  modified_base 14: mod_base = OTHER; note = Locked nucleic acid with phosphorothioate linkage
  modified_base 15: mod_base = OTHER; note = 2'-O-methoxyethyl modified nucleotide with phosphorothioate linkage
  modified_base 16: mod_base = OTHER; note = Locked nucleic acid
  misc_feature 1..3: note = RNA
  misc_feature 4..12: note = DNA
  misc_feature 13..16: note = RNA
gtggccaggtaggacc

SEQ ID NO: 3269 - DNA, 16 bp, synthetic construct
  source 1..16: mol_type = other DNA
tccgtttgtgctcgat

SEQ ID NO: 3270 - DNA, 16 bp, synthetic construct
  source 1..16: mol_type = other DNA
ccgtttgtgctcgata

SEQ ID NO: 3271 - DNA, 16 bp, synthetic construct
  source 1..16: mol_type = other DNA
cgtttgtgctcgataa

SEQ ID NO: 3272 - DNA, 16 bp, synthetic construct
  source 1..16: mol_type = other DNA
ttccgtttgtgctcga

SEQ ID NO: 3273 - DNA, 16 bp, synthetic construct
  source 1..16: mol_type = other DNA
  modified_base 1: mod_base = OTHER; note = Locked thymine with phosphorothioate linkage
  modified_base 2: mod_base = OTHER; note = Locked 5-Methylcytosine with phosphorothioate linkage
  modified_base 3: mod_base = OTHER; note = 2'-O-methoxyethyl modified 5-Methylcytosine with phosphorothioate linkage
  modified_base 4: mod_base = OTHER; note = 2'-O-methoxyethyl modified nucleotide with phosphorothioate linkage
  modified_base 5: mod_base = OTHER; note = Nucleotide with phosphorothioate linkage
  modified_base 6: mod_base = OTHER; note = Nucleotide with phosphorothioate linkage
  modified_base 7: mod_base = OTHER; note = Nucleotide with phosphorothioate linkage
  modified_base 8: mod_base = OTHER; note = Nucleotide with phosphorothioate linkage
  modified_base 9: mod_base = OTHER; note = Nucleotide with phosphorothioate linkage
  modified_base 10: mod_base = OTHER; note = Nucleotide with phosphorothioate linkage
  modified_base 11: mod_base = OTHER; note = 5-Methylcytosine with phosphorothioate linkage
  modified_base 12: mod_base = OTHER; note = Nucleotide with phosphorothioate linkage
  modified_base 13: mod_base = OTHER; note = 2'-O-methoxyethyl modified 5-Methylcytosine with phosphorothioate linkage
  modified_base 14: mod_base = OTHER; note = 2'-O-methoxyethyl modified nucleotide with phosphorothioate linkage
  modified_base 15: mod_base = OTHER; note = Locked nucleic acid with phosphorothioate linkage
  modified_base 16: mod_base = OTHER; note = Locked thymine
  misc_feature 1..4: note = RNA
  misc_feature 5..12: note = DNA
  misc_feature 13..16: note = RNA
tccgtttgtgctcgat

SEQ ID NO: 3274 - DNA, 16 bp, synthetic construct
  source 1..16: mol_type = other DNA
  modified_base 1: mod_base = OTHER; note = Locked thymine with phosphorothioate linkage attached to aminohexyl spacer (NH2C6)
  modified_base 2: mod_base = OTHER; note = Locked 5-Methylcytosine with phosphorothioate linkage
  modified_base 3: mod_base = OTHER; note = 2'-O-methoxyethyl modified 5-Methylcytosine with phosphorothioate linkage
  modified_base 4: mod_base = OTHER; note = 2'-O-methoxyethyl modified nucleotide with phosphorothioate linkage
  modified_base 5: mod_base = OTHER; note = Nucleotide with phosphorothioate linkage
  modified_base 6: mod_base = OTHER; note = Nucleotide with phosphorothioate linkage
  modified_base 7: mod_base = OTHER; note = Nucleotide with phosphorothioate linkage
  modified_base 8: mod_base = OTHER; note = Nucleotide with phosphorothioate linkage
  modified_base 9: mod_base = OTHER; note = Nucleotide with phosphorothioate linkage
  modified_base 10: mod_base = OTHER; note = Nucleotide with phosphorothioate linkage
  modified_base 11: mod_base = OTHER; note = 5-Methylcytosine with phosphorothioate linkage
  modified_base 12: mod_base = OTHER; note = Nucleotide with phosphorothioate linkage
  modified_base 13: mod_base = OTHER; note = 2'-O-methoxyethyl modified 5-Methylcytosine with phosphorothioate linkage
  modified_base 14: mod_base = OTHER; note = 2'-O-methoxyethyl modified nucleotide with phosphorothioate linkage
  modified_base 15: mod_base = OTHER; note = Locked nucleic acid with phosphorothioate linkage
  modified_base 16: mod_base = OTHER; note = Locked thymine
  misc_feature 1..4: note = RNA
  misc_feature 5..12: note = DNA
  misc_feature 13..16: note = RNA
tccgtttgtgctcgat

SEQ ID NO: 3275 - DNA, 16 bp, synthetic construct
  source 1..16: mol_type = other DNA
  modified_base 1: mod_base = OTHER; note = Locked 5-Methylcytosine with phosphorothioate linkage
  modified_base 2: mod_base = OTHER; note = Locked 5-Methylcytosine with phosphorothioate linkage
  modified_base 3: mod_base = OTHER; note = 2'-O-methoxyethyl modified nucleotide with phosphorothioate linkage
  modified_base 4: mod_base = OTHER; note = 2'-O-methoxyethyl modified thymine with phosphorothioate linkage
  modified_base 5: mod_base = OTHER; note = Nucleotide with phosphorothioate linkage
  modified_base 6: mod_base = OTHER; note = Nucleotide with phosphorothioate linkage
  modified_base 7: mod_base = OTHER; note = Nucleotide with phosphorothioate linkage
  modified_base 8: mod_base = OTHER; note = Nucleotide with phosphorothioate linkage
  modified_base 9: mod_base = OTHER; note = Nucleotide with phosphorothioate linkage
  modified_base 10: mod_base = OTHER; note = 5-Methylcytosine with phosphorothioate linkage
  modified_base 11: mod_base = OTHER; note = Nucleotide with phosphorothioate linkage
  modified_base 12: mod_base = OTHER; note = 5-Methylcytosine with phosphorothioate linkage
  modified_base 13: mod_base = OTHER; note = 2'-O-methoxyethyl modified nucleotide with phosphorothioate linkage
  modified_base 14: mod_base = OTHER; note = 2'-O-methoxyethyl modified nucleotide with phosphorothioate linkage
  modified_base 15: mod_base = OTHER; note = Locked thymine with phosphorothioate linkage
  modified_base 16: mod_base = OTHER; note = Locked nucleic acid
  misc_feature 1..4: note = RNA
  misc_feature 5..12: note = DNA
  misc_feature 13..16: note = RNA
ccgtttgtgctcgata

SEQ ID NO: 3276 - DNA, 16 bp, synthetic construct
  source 1..16: mol_type = other DNA
  modified_base 1: mod_base = OTHER; note = Locked 5-Methylcytosine with phosphorothioate linkage attached to aminohexyl spacer (NH2C6)
  modified_base 2: mod_base = OTHER; note = Locked 5-Methylcytosine with phosphorothioate linkage
  modified_base 3: mod_base = OTHER; note = 2'-O-methoxyethyl modified nucleotide with phosphorothioate linkage
  modified_base 4: mod_base = OTHER; note = 2'-O-methoxyethyl modified thymine with phosphorothioate linkage
  modified_base 5: mod_base = OTHER; note = Nucleotide with phosphorothioate linkage
  modified_base 6: mod_base = OTHER; note = Nucleotide with phosphorothioate linkage
  modified_base 7: mod_base = OTHER; note = Nucleotide with phosphorothioate linkage
  modified_base 8: mod_base = OTHER; note = Nucleotide with phosphorothioate linkage
  modified_base 9: mod_base = OTHER; note = Nucleotide with phosphorothioate linkage
  modified_base 10: mod_base = OTHER; note = 5-Methylcytosine with phosphorothioate linkage
  modified_base 11: mod_base = OTHER; note = Nucleotide with phosphorothioate linkage
  modified_base 12: mod_base = OTHER; note = 5-Methylcytosine with phosphorothioate linkage
  modified_base 13: mod_base = OTHER; note = 2'-O-methoxyethyl modified nucleotide with phosphorothioate linkage
  modified_base 14: mod_base = OTHER; note = 2'-O-methoxyethyl modified nucleotide with phosphorothioate linkage
  modified_base 15: mod_base = OTHER; note = Locked thymine with phosphorothioate linkage
  modified_base 16: mod_base = OTHER; note = Locked nucleic acid
  misc_feature 1..4: note = RNA
  misc_feature 5..12: note = DNA
  misc_feature 13..16: note = RNA
ccgtttgtgctcgata

SEQ ID NO: 3277 - DNA, 16 bp, synthetic construct
  source 1..16: mol_type = other DNA
  modified_base 1: mod_base = OTHER; note = Locked nucleic acid with phosphorothioate linkage
  modified_base 2: mod_base = OTHER; note = Locked nucleic acid with phosphorothioate linkage
  modified_base 3: mod_base = OTHER; note = 2'-O-methoxyethyl modified thymine with phosphorothioate linkage
  modified_base 4: mod_base = OTHER; note = 2'-O-methoxyethyl modified thymine with phosphorothioate linkage
  modified_base 5: mod_base = OTHER; note = Nucleotide with phosphorothioate linkage
  modified_base 6: mod_base = OTHER; note = Nucleotide with phosphorothioate linkage
  modified_base 7: mod_base = OTHER; note = Nucleotide with phosphorothioate linkage
  modified_base 8: mod_base = OTHER; note = Nucleotide with phosphorothioate linkage
  modified_base 9: mod_base = OTHER; note = 5-Methylcytosine with phosphorothioate linkage
  modified_base 10: mod_base = OTHER; note = Nucleotide with phosphorothioate linkage
  modified_base 11: mod_base = OTHER; note = 5-Methylcytosine with phosphorothioate linkage
  modified_base 12: mod_base = OTHER; note = Nucleotide with phosphorothioate linkage
  modified_base 13: mod_base = OTHER; note = 2'-O-methoxyethyl modified nucleotide with phosphorothioate linkage
  modified_base 14: mod_base = OTHER; note = 2'-O-methoxyethyl modified thymine with phosphorothioate linkage
  modified_base 15: mod_base = OTHER; note = Locked nucleic acid with phosphorothioate linkage
  modified_base 16: mod_base = OTHER; note = Locked nucleic acid
  misc_feature 1..4: note = RNA
  misc_feature 5..12: note = DNA
  misc_feature 13..16: note = RNA
cgtttgtgctcgataa

SEQ ID NO: 3278 - DNA, 16 bp, synthetic construct
  source 1..16: mol_type = other DNA
  modified_base 1: mod_base = OTHER; note = Locked nucleic acid with phosphorothioate linkage
  modified_base 2: mod_base = OTHER; note = Locked nucleic acid with phosphorothioate linkage
  modified_base 3: mod_base = OTHER; note = 2'-O-methoxyethyl modified nucleotide with phosphorothioate linkage
  modified_base 4: mod_base = OTHER; note = 2'-O-methoxyethyl modified thymine with phosphorothioate linkage
  modified_base 5: mod_base = OTHER; note = Nucleotide with phosphorothioate linkage
  modified_base 6: mod_base = OTHER; note = Nucleotide with phosphorothioate linkage
  modified_base 7: mod_base = OTHER; note = Nucleotide with phosphorothioate linkage
  modified_base 8: mod_base = OTHER; note = Nucleotide with phosphorothioate linkage
  modified_base 9: mod_base = OTHER; note = Nucleotide with phosphorothioate linkage
  modified_base 10: mod_base = OTHER; note = 5-Methylcytosine with phosphorothioate linkage
  modified_base 11: mod_base = OTHER; note = Nucleotide with phosphorothioate linkage
  modified_base 12: mod_base = OTHER; note = 5-Methylcytosine with phosphorothioate linkage
  modified_base 13: mod_base = OTHER; note = 2'-O-methoxyethyl modified nucleotide with phosphorothioate linkage
  modified_base 14: mod_base = OTHER; note = 2'-O-methoxyethyl modified nucleotide with phosphorothioate linkage
  modified_base 15: mod_base = OTHER; note = Locked thymine with phosphorothioate linkage
  modified_base 16: mod_base = OTHER; note = Locked nucleic acid
  misc_feature 1..4: note = RNA
  misc_feature 5..12: note = DNA
  misc_feature 13..16: note = RNA
ccgtttgtgctcgata

SEQ ID NO: 3279 - DNA, 16 bp, synthetic construct
  source 1..16: mol_type = other DNA
  modified_base 1: mod_base = OTHER; note = Locked thymine with phosphorothioate linkage
  modified_base 2: mod_base = OTHER; note = Locked nucleic acid with phosphorothioate linkage
  modified_base 3: mod_base = OTHER; note = 2'-O-methoxyethyl modified nucleotide with phosphorothioate linkage
  modified_base 4: mod_base = OTHER; note = 2'-O-methoxyethyl modified nucleotide with phosphorothioate linkage
  modified_base 5: mod_base = OTHER; note = Nucleotide with phosphorothioate linkage
  modified_base 6: mod_base = OTHER; note = Nucleotide with phosphorothioate linkage
  modified_base 7: mod_base = OTHER; note = Nucleotide with phosphorothioate linkage
  modified_base 8: mod_base = OTHER; note = Nucleotide with phosphorothioate linkage
  modified_base 9: mod_base = OTHER; note = Nucleotide with phosphorothioate linkage
  modified_base 10: mod_base = OTHER; note = Nucleotide with phosphorothioate linkage
  modified_base 11: mod_base = OTHER; note = 5-Methylcytosine with phosphorothioate linkage
  modified_base 12: mod_base = OTHER; note = Nucleotide with phosphorothioate linkage
  modified_base 13: mod_base = OTHER; note = 2'-O-methoxyethyl modified nucleotide with phosphorothioate linkage
  modified_base 14: mod_base = OTHER; note = 2'-O-methoxyethyl modified nucleotide with phosphorothioate linkage
  modified_base 15: mod_base = OTHER; note = Locked nucleic acid with phosphorothioate linkage
  modified_base 16: mod_base = OTHER; note = Locked thymine
  misc_feature 1..4: note = RNA
  misc_feature 5..12: note = DNA
  misc_feature 13..16: note = RNA
tccgtttgtgctcgat

SEQ ID NO: 3280 - DNA, 16 bp, synthetic construct
  source 1..16: mol_type = other DNA
  modified_base 1: mod_base = OTHER; note = Locked thymine with phosphorothioate linkage
  modified_base 2: mod_base = OTHER; note = Locked thymine with phosphorothioate linkage
  modified_base 3: mod_base = OTHER; note = 2'-O-methoxyethyl modified nucleotide with phosphorothioate linkage
  modified_base 4: mod_base = OTHER; note = 2'-O-methoxyethyl modified nucleotide with phosphorothioate linkage
  modified_base 5: mod_base = OTHER; note = Nucleotide with phosphorothioate linkage
  modified_base 6: mod_base = OTHER; note = Nucleotide with phosphorothioate linkage
  modified_base 7: mod_base = OTHER; note = Nucleotide with phosphorothioate linkage
  modified_base 8: mod_base = OTHER; note = Nucleotide with phosphorothioate linkage
  modified_base 9: mod_base = OTHER; note = Nucleotide with phosphorothioate linkage
  modified_base 10: mod_base = OTHER; note = Nucleotide with phosphorothioate linkage
  modified_base 11: mod_base = OTHER; note = Nucleotide with phosphorothioate linkage
  modified_base 12: mod_base = OTHER; note = 5-Methylcytosine with phosphorothioate linkage
  modified_base 13: mod_base = OTHER; note = 2'-O-methoxyethyl modified thymine with phosphorothioate linkage
  modified_base 14: mod_base = OTHER; note = 2'-O-methoxyethyl modified nucleotide with phosphorothioate linkage
  modified_base 15: mod_base = OTHER; note = Locked nucleic acid with phosphorothioate linkage
  modified_base 16: mod_base = OTHER; note = Locked nucleic acid
  misc_feature 1..4: note = RNA
  misc_feature 5..12: note = DNA
  misc_feature 13..16: note = RNA
ttccgtttgtgctcga

SEQ ID NO: 3281 - protein, 760 aa, Homo sapiens
MMDQARSAFSNLFGGEPLSYTRFSLARQVDGDNSHVEMKLAVDEEENADNNTKANVTKPKRCSGSICYGTIAVIVFFLIGFMIGYLGYCKGVEPKTECERLAGTESPVREEPGEDFPAARRLYWDDLKRKLSEKLDSTDFTGTIKLLNENSYVPREAGSQKDENLALYVENQFREFKLSKVWRDQHFVKIQVKDSAQNSVIIVDKNGRLVYLVENPGGYVAYSKAATVTGKLVHANFGTKKDFEDLYTPVNGSIVIVRAGKITFAEKVANAESLNAIGVLIYMDQTKFPIVNAELSFFGHAHLGTGDPYTPGFPSFNHTQFPPSRSSGLPNIPVQTISRAAAEKLFGNMEGDCPSDWKTDSTCRMVTSESKNVKLTVSNVLKEIKILNIFGVIKGFVEPDHYVVVGAQRDAWGPGAAKSGVGTALLLKLAQMFSDMVLKDGFQPSRSIIFASWSAGDFGSVGATEWLEGYLSSLHLKAFTYINLDKAVLGTSNFKVSASPLLYTLIEKTMQNVKHPVTGQFLYQDSNWASKVEKLTLDNAAFPFLAYSGIPAVSFCFCEDTDYPYLGTTMDTYKELIERIPELNKVARAAAEVAGQFVIKLTHDVELNLDYERYNSQLLSFVRDLNQYRADIKEMGLSLQWLYSARGDFFRATSRLTTDFGNAEKTDRFVMKKLNDRVMRVEYHFLSPYVSPKESPFRHVFWGSGSHTLPALLENLKLRKQNNGAFNETLFRNQLALATWTIQGAANALSGDVWDIDNEF

SEQ ID NO: 3282 - protein, 801 aa, Homo sapiens
MERLWGLFQRAQQLSPRSSQTVYQRVEGPRKGHLEEEEEDGEEGAETLAHFCPMELRGPEPLGSRPRQPNLIPWAAAGRRAAPYLVLTALLIFTGAFLLGYVAFRGSCQACGDSVLVVSEDVNYEPDLDFHQGRLYWSDLQAMFLQFLGEGRLEDTIRQTSLRERVAGSAGMAALTQDIRAALSRQKLDHVWTDTHYVGLQFPDPAHPNTLHWVDEAGKVGEQLPLEDPDVYCPYSAIGNVTGELVYAHYGRPEDLQDLRARGVDPVGRLLLVRVGVISFAQKVTNAQDFGAQGVLIYPEPADFSQDPPKPSLSSQQAVYGHVHLGTGDPYTPGFPSFNQTQFPPVASSGLPSIPAQPISADIASRLLRKLKGPVAPQEWQGSLLGSPYHLGPGPRLRLVVNNHRTSTPINNIFGCIEGRSEPDHYVVIGAQRDAWGPGAAKSAVGTAILLELVRTFSSMVSNGFRPRRSLLFISWDGGDFGSVGSTEWLEGYLSVLHLKAVVYVSLDNAVLGDDKFHAKTSPLLTSLIESVLKQVDSPNHSGQTLYEQVVFTNPSWDAEVIRPLPMDSSAYSFTAFVGVPAVEFSFMEDDQAYPFLHTKEDTYENLHKVLQGRLPAVAQAVAQLAGQLLIRLSHDRLLPLDFGRYGDVVLRHIGNLNEFSGDLKARGLTLQWVYSARGDYIRAAEKLRQEIYSSEERDERLTRMYNVRIMRVEFYFLSQYVSPADSPFRHIFMGRGDHTLGALLDHLRLLRSNSSGTPGATSSTGFQESRFRRQLALLTWTLQGAANALSGDVWNIDNNF

SEQ ID NO: 3283 - protein, 679 aa, Homo sapiens
VPDKTVRWCAVSEHEATKCQSFRDHMKSVIPSDGPSVACVKKASYLDCIRAIAANEADAVTLDAGLVYDAYLAPNNLKPVVAEFYGSKEDPQTFYYAVAVVKKDSGFQMNQLRGKKSCHTGLGRSAGWNIPIGLLYCDLPEPRKPLEKAVANFFSGSCAPCADGTDFPQLCQLCPGCGCSTLNQYFGYSGAFKCLKDGAGDVAFVKHSTIFENLANKADRDQYELLCLDNTRKPVDEYKDCHLAQVPSHTVVARSMGGKEDLIWELLNQAQEHFGKDKSKEFQLFSSPHGKDLLFKDSAHGFLKVPPRMDAKMYLGYEYVTAIRNLREGTCPEAPTDECKPVKWCALSHHERLKCDEWSVNSVGKIECVSAETTEDCIAKIMNGEADAMSLDGGFVYIAGKCGLVPVLAENYNKSDNCEDTPEAGYFAVAVVKKSASDLTWDNLKGKKSCHTAVGRTAGWNIPMGLLYNKINHCRFDEFFSEGCAPGSKKDSSLCKLCMGSGLNLCEPNNKEGYYGYTGAFRCLVEKGDVAFVKHQTVPQNTGGKNPDPWAKNLNEKDYELLCLDGTRKPVEEYANCHLARAPNHAVVTRKDKEACVHKILRQQQHLFGSNVTDCSGNFCLFRSETKDLLFRDDTVCLAKLHDRNTYEKYLGEEYVKAVGNLRKCSTSSLLEACTFRRP

SEQ ID NO: 3284 - protein, 679 aa, synthetic construct
CPDKTVRWCAVSEHEATKCQSFRDHMKSVIPSDGPSVACVKKASYLDCIRAIAANEADAVTLDAGLVYDAYLAPNNLKPVVAEFYGSKEDPQTFYYAVAVVKKDSGFQMNQLRGKKSCHTGLGRSAGWNIPIGLLYCDLPEPRKPLEKAVANFFSGSCAPCADGTDFPQLCQLCPGCGCSTLNQYFGYSGAFKCLKDGAGDVAFVKHSTIFENLANKADRDQYELLCLDNTRKPVDEYKDCHLAQVPSHTVVARSMGGKEDLIWELLNQAQEHFGKDKSKEFQLFSSPHGKDLLFKDSAHGFLKVPPRMDAKMYLGYEYVTAIRNLREGTCPEAPTDECKPVKWCALSHHERLKCDEWSVNSVGKIECVSAETTEDCIAKIMNGEADAMSLDGGFVYIAGKCGLVPVLAENYNKSDNCEDTPEAGYFAVAVVKKSASDLTWDNLKGKKSCHTAVGRTAGWNIPMGLLYNKINHCRFDEFFSEGCAPGSKKDSSLCKLCMGSGLNLCEPNNKEGYYGYTGAFRCLVEKGDVAFVKHQTVPQNTGGKNPDPWAKNLNEKDYELLCLDGTRKPVEEYANCHLARAPNHAVVTRKDKEACVHKILRQQQHLFGSNVTDCSGNFCLFRSETKDLLFRDDTVCLAKLHDRNTYEKYLGEEYVKAVGNLRKCSTSSLLEACTFRRP

SEQ ID NO: 3285 - protein, 679 aa, synthetic construct
VPDKTVRWCAVSEHEATKCQSFRDHMKCVIPSDGPSVACVKKASYLDCIRAIAANEADAVTLDAGLVYDAYLAPNNLKPVVAEFYGSKEDPQTFYYAVAVVKKDSGFQMNQLRGKKSCHTGLGRSAGWNIPIGLLYCDLPEPRKPLEKAVANFFSGSCAPCADGTDFPQLCQLCPGCGCSTLNQYFGYSGAFKCLKDGAGDVAFVKHSTIFENLANKADRDQYELLCLDNTRKPVDEYKDCHLAQVPSHTVVARSMGGKEDLIWELLNQAQEHFGKDKSKEFQLFSSPHGKDLLFKDSAHGFLKVPPRMDAKMYLGYEYVTAIRNLREGTCPEAPTDECKPVKWCALSHHERLKCDEWSVNSVGKIECVSAETTEDCIAKIMNGEADAMSLDGGFVYIAGKCGLVPVLAENYNKSDNCEDTPEAGYFAVAVVKKSASDLTWDNLKGKKSCHTAVGRTAGWNIPMGLLYNKINHCRFDEFFSEGCAPGSKKDSSLCKLCMGSGLNLCEPNNKEGYYGYTGAFRCLVEKGDVAFVKHQTVPQNTGGKNPDPWAKNLNEKDYELLCLDGTRKPVEEYANCHLARAPNHAVVTRKDKEACVHKILRQQQHLFGSNVTDCSGNFCLFRSETKDLLFRDDTVCLAKLHDRNTYEKYLGEEYVKAVGNLRKCSTSSLLEACTFRRP

SEQ ID NO: 3286 - protein, 679 aa, synthetic construct
VPDKTVRWCAVSEHEATKCQSFRDHMKSVIPCDGPSVACVKKASYLDCIRAIAANEADAVTLDAGLVYDAYLAPNNLKPVVAEFYGSKEDPQTFYYAVAVVKKDSGFQMNQLRGKKSCHTGLGRSAGWNIPIGLLYCDLPEPRKPLEKAVANFFSGSCAPCADGTDFPQLCQLCPGCGCSTLNQYFGYSGAFKCLKDGAGDVAFVKHSTIFENLANKADRDQYELLCLDNTRKPVDEYKDCHLAQVPSHTVVARSMGGKEDLIWELLNQAQEHFGKDKSKEFQLFSSPHGKDLLFKDSAHGFLKVPPRMDAKMYLGYEYVTAIRNLREGTCPEAPTDECKPVKWCALSHHERLKCDEWSVNSVGKIECVSAETTEDCIAKIMNGEADAMSLDGGFVYIAGKCGLVPVLAENYNKSDNCEDTPEAGYFAVAVVKKSASDLTWDNLKGKKSCHTAVGRTAGWNIPMGLLYNKINHCRFDEFFSEGCAPGSKKDSSLCKLCMGSGLNLCEPNNKEGYYGYTGAFRCLVEKGDVAFVKHQTVPQNTGGKNPDPWAKNLNEKDYELLCLDGTRKPVEEYANCHLARAPNHAVVTRKDKEACVHKILRQQQHLFGSNVTDCSGNFCLFRSETKDLLFRDDTVCLAKLHDRNTYEKYLGEEYVKAVGNLRKCSTSSLLEACTFRRP

SEQ ID NO: 3287 - protein, 679 aa, synthetic construct
VPDKTVRWCAVSEHEATKCQSFRDHMKSVIPSDGPSVACVKKASYLDCIRAIAANEADAVTLDAGLVYDAYLAPNNLKPVVAEFYGSKEDPQTFYYAVAVVKKCSGFQMNQLRGKKSCHTGLGRSAGWNIPIGLLYCDLPEPRKPLEKAVANFFSGSCAPCADGTDFPQLCQLCPGCGCSTLNQYFGYSGAFKCLKDGAGDVAFVKHSTIFENLANKADRDQYELLCLDNTRKPVDEYKDCHLAQVPSHTVVARSMGGKEDLIWELLNQAQEHFGKDKSKEFQLFSSPHGKDLLFKDSAHGFLKVPPRMDAKMYLGYEYVTAIRNLREGTCPEAPTDECKPVKWCALSHHERLKCDEWSVNSVGKIECVSAETTEDCIAKIMNGEADAMSLDGGFVYIAGKCGLVPVLAENYNKSDNCEDTPEAGYFAVAVVKKSASDLTWDNLKGKKSCHTAVGRTAGWNIPMGLLYNKINHCRFDEFFSEGCAPGSKKDSSLCKLCMGSGLNLCEPNNKEGYYGYTGAFRCLVEKGDVAFVKHQTVPQNTGGKNPDPWAKNLNEKDYELLCLDGTRKPVEEYANCHLARAPNHAVVTRKDKEACVHKILRQQQHLFGSNVTDCSGNFCLFRSETKDLLFRDDTVCLAKLHDRNTYEKYLGEEYVKAVGNLRKCSTSSLLEACTFRRP

SEQ ID NO: 3288 - protein, 679 aa, synthetic construct
VPDKTVRWCAVSEHEATKCQSFRDHMKSVIPSDGPSVACVKKASYLDCIRAIAANEADAVTLDAGLVYDAYLAPNNLKPVVAEFYGSKEDPQTFYYAVAVVKKDSGFQMNQLRGKKSCHTGLGRSAGWNIPIGLLYCDLPEPRKPLEKAVANFFSGSCAPCADGCDFPQLCQLCPGCGCSTLNQYFGYSGAFKCLKDGAGDVAFVKHSTIFENLANKADRDQYELLCLDNTRKPVDEYKDCHLAQVPSHTVVARSMGGKEDLIWELLNQAQEHFGKDKSKEFQLFSSPHGKDLLFKDSAHGFLKVPPRMDAKMYLGYEYVTAIRNLREGTCPEAPTDECKPVKWCALSHHERLKCDEWSVNSVGKIECVSAETTEDCIAKIMNGEADAMSLDGGFVYIAGKCGLVPVLAENYNKSDNCEDTPEAGYFAVAVVKKSASDLTWDNLKGKKSCHTAVGRTAGWNIPMGLLYNKINHCRFDEFFSEGCAPGSKKDSSLCKLCMGSGLNLCEPNNKEGYYGYTGAFRCLVEKGDVAFVKHQTVPQNTGGKNPDPWAKNLNEKDYELLCLDGTRKPVEEYANCHLARAPNHAVVTRKDKEACVHKILRQQQHLFGSNVTDCSGNFCLFRSETKDLLFRDDTVCLAKLHDRNTYEKYLGEEYVKAVGNLRKCSTSSLLEACTFRRP

SEQ ID NO: 3289 - protein, 679 aa, synthetic construct
VPDKTVRWCAVSEHEATKCQSFRDHMKSVIPSDGPSVACVKKASYLDCIRAIAANEADAVTLDAGLVYDAYLAPNNLKPVVAEFYGSKEDPQTFYYAVAVVKKDSGFQMNQLRGKKSCHTGLGRSAGWNIPIGLLYCDLPEPRKPLEKAVANFFSGSCAPCADGTDFPQLCQLCPGCGCSTLNQYFGYSGAFKCLKDGAGDVAFVKHSTIFENLANKADRDQYELLCLDNTRKPVDEYKDCHLAQVPSHTVVARSMGGKEDLIWELLNQAQEHFGKDKSKEFQLFSSPHGKDLLFKDSAHGFLKVPPRMDAKMYLGYEYVTAIRNLREGTCPEAPTDECKPVKWCALSHHERLKCDEWSVNSVGKIECVSAETTEDCIAKIMNGEADAMSLDGGFVYIAGKCGLVPVLAENYNKADNCEDTPEAGYFAVAVVKKSASDLTWDNLKGKKSCHTAVGRTAGWNIPMGLLYNKINHCRFDEFFSEGCAPGSKKDSSLCKLCMGSGLNLCEPNNKEGYYGYTGAFRCLVEKGDVAFVKHQTVPQNTGGKNPDPWAKNLNEKDYELLCLDGTRKPVEEYANCHLARAPNHAVVTRKDKEACVHKILRQQQHLFGSNVTDCSGNFCLFRSETKDLLFRDDTVCLAKLHDRNTYEKYLGEEYVKAVGNLRKCSTSSLLEACTFRRP

SEQ ID NO: 3290 - protein, 679 aa, synthetic construct
VPDKTVRWCAVSEHEATKCQSFRDHMKSVIPSDGPSVACVKKASYLDCIRAIAANEADAVTLDAGLVYDAYLAPNNLKPVVAEFYGSKEDPQTFYYAVAVVKKDSGFQMNQLRGKKSCHTGLGRSAGWNIPIGLLYCDLPEPRKPLEKAVANFFSGSCAPCADGTDFPQLCQLCPGCGCSTLNQYFGYSGAFKCLKDGAGDVAFVEHSTIFENLANKADRDQYELLCLDNTRKPVDEYKDCHLAQVPSHTVVARSMGGKEDLIWELLNQAQEHFGKDKSKEFQLFSSPHGKDLLFKDSAHGFLKVPPRMDAKMYLGYEYVTAIRNLREGTCPEAPTDECKPVKWCALSHHERLKCDEWSVNSVGKIECVSAETTEDCIAKIMNGEADAMSLDGGFVYIAGKCGLVPVLAENYNKSDNCEDTPEAGYFAVAVVKKSASDLTWDNLKGKKSCHTAVGRTAGWNIPMGLLYNKINHCRFDEFFSEGCAPGSKKDSSLCKLCMGSGLNLCEPNNKEGYYGYTGAFRCLVEKGDVAFVKHQTVPQNTGGKNPDPWAKNLNEKDYELLCLDGTRKPVEEYANCHLARAPNHAVVTRKDKEACVHKILRQQQHLFGSNVTDCSGNFCLFRSETKDLLFRDDTVCLAKLHDRNTYEKYLGEEYVKAVGNLRKCSTSSLLEACTFRRP

SEQ ID NO: 3291 - protein, 679 aa, synthetic construct
VPDKTVRWCAVSEHEATKCQSFRDHMKSVIPSDGPSVACVKKASYLDCIRAIAANEADAVTLDAGLVYDAYLAPNNLKPVVAEFYGSKEDPQTFYYAVAVVKKDSGFQMNQLRGKKSCHTGLGRSAGWNIPIGLLYCDLPEPRKPLEKAVANFFSGSCAPCADGTDFPQLCQLCPGCGCSTLNQYFGYSGAFKCLKDGAGDVAFVEHSTIFENLANKADRDQYELLCLDNTRKPVDEYKDCHLAQVPSHTVVARSMGGKEDLIWELLNQAQEHFGKDKSKEFQLFSSPHGKDLLFKDSAHGFLKVPPRMDAKMYLGYEYVTAIRNLREGTCPEAPTDECKPVKWCALSHHERLKCDEWSVNSVGKIECVSAETTEDCIAKIMNGEADAMSLDGGFVYIAGKCGLVPVLAENYNKSDNCEDTPEAGYFAVAVVKKSASDLTWDNLKGKKSCHTAVGRTAGWNIPMGLLYNKINHCRFDEFFSEGCAPGSKKDSSLCKLCMGSGLNLCEPNNKEGYYGYTGAFRCLVEKGDVAFVKHQTVPQNTGGKNPDPWAKNLNEKDYELLCLDGTRKPVEEYANCHLARAPNHAVVTRKDKEACVHKILRQQQHLFGSNVTDCSGNFCLFRSETKDLLFADDTVCLAKLHDRNTYEKYLGEEYVKAVGNLRKCSTSSLLEACTFRRP

SEQ ID NO: 3292 - protein, 679 aa, synthetic construct
VPDKTVRWCAVSEHEATKCQSFRDHMKSVIPSDGPSVACVKKASYLDCIRAIAANEADAVTLDAGLVYDAYLAPNNLKPVVAEFYGSKEDPQTFYYAVAVVKKDSGFQMNQLRGKKSCHTGLGRSAGWNIPIGLLYCDLPEPRKPLEKAVANFFSGSCAPCADGTDFPQLCQLCPGCGCSTLNQYFGYSGAFKCLKDGAGDVAFVEHSTIFENLANKADRDQYELLCLDNTRKPVDEYKDCHLAQVPSHTVVARSMGGKEDLIWELLNQAQEHFGKDKSKEFQLFSSPHGKDLLFKDSAHGFLKVPPRMDAKMYLGYEYVTAIRNLREGTCPEAPTDECKPVKWCALSHHERLKCDEWSVNSVGKIECVSAETTEDCIAKIMNGEADAMSLDGGFVYIAGKCGLVPVLAENYNKSDNCEDTPEAGYFAVAVVKKSASDLTWDNLKGKKSCHTAVGRTAGWNIPMGLLYNKINHCRFDEFFSEGCAPGSKKDSSLCKLCMGSGLNLCEPNNKEGYYGYTGAFRCLVEKGDVAFVAHQTVPQNTGGKNPDPWAKNLNEKDYELLCLDGTRKPVEEYANCHLARAPNHAVVTRKDKEACVHKILRQQQHLFGSNVTDCSGNFCLFRSETKDLLFRDDTVCLAKLHDRNTYEKYLGEEYVKAVGNLRKCSTSSLLEACTFRRP

SEQ ID NO: 3293 - protein, 7 aa, synthetic construct
HAIYPRH

SEQ ID NO: 3294 - protein, 12 aa, synthetic construct
THRPPMWSPVWP

SEQ ID NO: 3295 - protein, 33 aa, synthetic construct
GGGDIMGEWGNEIFGAIAGFLGGGRRRRRRRRR

SEQ ID NO: 3296 - protein, 49 aa, synthetic construct
REGCASRCTKYNAELEKCEARVSSMSNTEETCVQELFDLLHCVDHCVSQ

SEQ ID NO: 3297 - protein, 49 aa, synthetic construct
REGCASRCTKYNAELEKCEARVMSMSNTEEDCEQELEDLLHCLDHCHSQ

SEQ ID NO: 3298 - protein, 49 aa, synthetic construct
REGCASRCTKYNAELEKCEARVVSMSNTEEDCEQELEDLLHCLDHCHSQ

SEQ ID NO: 3299 - protein, 49 aa, synthetic construct
REGCASRCTKYNAELEKCEARVMSMSNTEETCEQELEDLLHCLDHCHSQ

SEQ ID NO: 3300 - protein, 49 aa, synthetic construct
REGCASRCTKYNAELEKCEARVMSMSNTEEDCVQELEDLLHCLDHCHSQ

SEQ ID NO: 3301 - protein, 49 aa, synthetic construct
REGCASRCTKYNAELEKCEARVMSMSNTEEDCEQELFDLLHCLDHCHSQ

SEQ ID NO: 3302 - protein, 49 aa, synthetic construct
REGCASRCTKYNAELEKCEARVMSMSNTEEDCEQELEDLLHCVDHCHSQ

SEQ ID NO: 3303 - protein, 49 aa, synthetic construct
REGCASRCTKYNAELEKCEARVMSMSNTEEDCEQELEDLLHCLDHCVSQ

SEQ ID NO: 3304 - protein, 49 aa, synthetic construct
REGCASRCTKYNAELEKCEARVVSMSNTEETCEQELEDLLHCLDHCHSQ

SEQ ID NO: 3305 - protein, 49 aa, synthetic construct
REGCASRCTKYNAELEKCEARVVSMSNTEEDCVQELEDLLHCLDHCHSQ

SEQ ID NO: 3306 - protein, 49 aa, synthetic construct
REGCASRCTKYNAELEKCEARVVSMSNTEEDCEQELFDLLHCLDHCHSQ

SEQ ID NO: 3307 - protein, 49 aa, synthetic construct
REGCASRCTKYNAELEKCEARVVSMSNTEEDCEQELEDLLHCVDHCHSQ

SEQ ID NO: 3308 - protein, 49 aa, synthetic construct
REGCASRCTKYNAELEKCEARVVSMSNTEEDCEQELEDLLHCLDHCVSQ

SEQ ID NO: 3309 - protein, 49 aa, synthetic construct
REGCASRCTKYNAELEKCEARVMSMSNTEETCVQELEDLLHCLDHCHSQ

SEQ ID NO: 3310 - protein, 49 aa, synthetic construct
REGCASRCTKYNAELEKCEARVMSMSNTEETCEQELFDLLHCLDHCHSQ

SEQ ID NO: 3311 - protein, 49 aa, synthetic construct
REGCASRCTKYNAELEKCEARVMSMSNTEETCEQELEDLLHCVDHCHSQ

SEQ ID NO: 3312 - protein, 49 aa, synthetic construct
REGCASRCTKYNAELEKCEARVMSMSNTEETCEQELEDLLHCLDHCVSQ

SEQ ID NO: 3313 - protein, 49 aa, synthetic construct
REGCASRCTKYNAELEKCEARVMSMSNTEEDCVQELFDLLHCLDHCHSQ

SEQ ID NO: 3314 - protein, 49 aa, synthetic construct
REGCASRCTKYNAELEKCEARVMSMSNTEEDCVQELEDLLHCVDHCHSQ

SEQ ID NO: 3315 - protein, 49 aa, synthetic construct
REGCASRCTKYNAELEKCEARVMSMSNTEEDCVQELEDLLHCLDHCVSQ

SEQ ID NO: 3316 - protein, 49 aa, synthetic construct
REGCASRCTKYNAELEKCEARVMSMSNTEEDCEQELFDLLHCVDHCHSQ

SEQ ID NO: 3317 - protein, 49 aa, synthetic construct
REGCASRCTKYNAELEKCEARVMSMSNTEEDCEQELFDLLHCLDHCVSQ

SEQ ID NO: 3318 - protein, 49 aa, synthetic construct
REGCASRCTKYNAELEKCEARVMSMSNTEEDCEQELEDLLHCVDHCVSQ

SEQ ID NO: 3319 - protein, 49 aa, synthetic construct
REGCASRCMKYNAELEKCEARVMSMSNTEEDCEQELEDLLHCLDHCHSQ

SEQ ID NO: 3320 - protein, 49 aa, synthetic construct
REGCASRCTKYNDELEKCEARVMSMSNTEEDCEQELEDLLHCLDHCHSQ

SEQ ID NO: 3321 - protein, 49 aa, synthetic construct
REGCASRCTKYNAELEKCEARMMSMSNTEEDCEQELEDLLHCLDHCHSQ

SEQ ID NO: 3322 - protein, 90 aa, synthetic construct
MLPAPKNLVVSRVTEDSARLSWTAPDAAFDSFVIEYREGAWYGEAIVLTVPGSERSYDLTGLKPGTEYAVYIPGVKGGPRSFPLSAIFTT

SEQ ID NO: 3323 - protein, 90 aa, synthetic construct
MLPAPKNLVVSRVTEDSARLSWTAPDAAFDSFAIAYVEWWKLGEAIVLTVPGSERSYDLTGLKPGTEYVVPIPGVKGGGHSSPLSAIFTT

SEQ ID NO: 3324 - protein, 90 aa, synthetic construct
MLPAPKNLVVSRVTEDSARLSWTAPDAAFDSFYIYYYESSGTGEAIVLTVPGSERSYDLTGLKPGTEYFVDIGGVKGGSYSLPLSAIFTT

SEQ ID NO: 3325 - protein, 90 aa, synthetic construct
MLPAPKNLVVSRVTEDSARLSWTAPDAAFDSFPIYYWEVFPAGEAIELDVPGSERSYDLTGLKPGTEYFVRIEGVKGGASSYPLRAEFTT

SEQ ID NO: 3326 - protein, 90 aa, synthetic construct
MLPAPKNLVVSRVTEDSARLSWTAPDAAFDSFFIWYWEKSVDGEAIVLTVPGSERSYDLTGLKPGTEYNVGIQGVKGGTPSDPLSAIFTT

SEQ ID NO: 3327 - protein, 90 aa, synthetic construct
MLPAPKNLVVSRVTEDSARLSWTAPDAAFDSFIIWYAEWVNDGEAIVLTVPGSERSYDLTGLKPGTEYRVEITGVKGGTWSRPLSAIFTT

SEQ ID NO: 3328 - protein, 90 aa, synthetic construct
MLPAPKNLVVSRVTEDSARLSWTAPDAAFDSFAIEYYEPVPAGEAIYLDVPGSERSYDLTGLKPGTEYDVTIYGVKGGYYSHPLFASFTT

SEQ ID NO: 3329 - protein, 90 aa, synthetic construct
MLPAPKNLVVSRVTEDSARLSWTAPDAAFDSFWIEYFEWTVGGEAIVLTVPGSERSYDLTGLKPGTEYYVSIYGVKGGWLSPPLSAIFTT

SEQ ID NO: 3330 - protein, 90 aa, synthetic construct
MLPAPKNLVVSRVTEDSARLSWTAPDAAFDSFHISYEETPVVGEAIYLRVPGSERSYDLTGLKPGTEYTVAIHGVKGGRESTPLIAPFTT

SEQ ID NO: 3331 - protein, 90 aa, synthetic construct
MLPAPKNLVVSRVTEDSARLSWTAPDAAFDSFTIHYWEFDPPGEAIVLTVPGSERSYDLTGLKPGTEYTVYIEGVKGGWWSKPLSAIFTT

SEQ ID NO: 3332 - protein, 90 aa, synthetic construct
MLPAPKNLVVSRVTEDSARLSWTAPDAAFDSFVIEYWERTQPGEAIVLTVPGSERSYDLTGLKPGTEYDVWISGVKGGKWSEPLSAIFTT

SEQ ID NO: 3333 - protein, 90 aa, synthetic construct
MLPAPKNLVVSRVTEDSARLSWTAPDAAFDSFLIRYWEWYVLGEAIVLTVPGSERSYDLTGLKPGTEYYVEISGVKGGWQSWPLSAIFTT

SEQ ID NO: 3334 - protein, 90 aa, synthetic construct
MLPAPKNLVVSRVTEDSARLSWTAPDAAFDSFYIGYLEPGDNGEAIVLTVPGSERSYDLTGLKPGTEYNVSIGGVKGGLGSYPLSAIFTT

SEQ ID NO: 3335 - protein, 90 aa, synthetic construct
MLPAPKNLVVSRITEDSARLSWTAPDAAFDSFGIYYYEWWSTGEAIVLTVPGSERSYDLTGPKPGTEYYVKISGVKGGYRSYPLSAIFTT

SEQ ID NO: 3336 - protein, 90 aa, synthetic construct
MLPAPKNLVVSRVTEDSARLSWTAPDAAFDSFRISYYEWYDLGEAIVLTVPGSERSYDLTGLKPGTEYWVDIAGVKGGYYSYPLSAIFTT

SEQ ID NO: 3337 - protein, 90 aa, synthetic construct
MLPAPKNLVVSRVTEDSARLSWTAPDAAFDSFFIGYLEPQPPGEAIVLTVPGSERSYDLTGLKPGTEYNVTIQGVKGGFPSMPLSAIFTT

SEQ ID NO: 3338 - protein, 90 aa, synthetic construct
MLPAPKNLVVSRVTEDSARLSWTAPDAAFDSFFISYFEGWASGEAIHLYVPGSERSYDLTGLKPGTEYSVHIQGVKGGQPSTPLSAIFTT

SEQ ID NO: 3339 - protein, 90 aa, synthetic construct
MLPAPKNLVVSRITEDSARLSWTAPDAAFDSFDIPYGEFDTIGEAIVLTVPGSERSYDLTGLKPGTEYDVYIEGVKGGHLSWPLSAIFTT

SEQ ID NO: 3340 - protein, 90 aa, synthetic construct
MLPAPKNLVVSRVTEDSARLSWTAPDAAFDSFGIQYNEFVFRGEAIVLTVPGSERSYDLTGLKPGTEYFVPISGVKGGDDSRPLSAIFTT

SEQ ID NO: 3341 - protein, 90 aa, synthetic construct
MLPAPKNLVVSRVTEDSARLSWTAPDAAFDSFWIEYWEVVGFGEAIVLTVPGSERSYDLTGLKPGTEYWVGIYGVKGGNPSVPLSAIFTT

SEQ ID NO: 3342 - protein, 5 aa, synthetic construct
NYWLG

SEQ ID NO: 3343 - protein, 17 aa, synthetic construct
DIYPGGDYPTYSEKFKV

SEQ ID NO: 3344 - protein, 9 aa, synthetic construct
SGNYDEVAY

SEQ ID NO: 3345 - protein, 16 aa, synthetic construct
RSSQSLVHSNGNTYLH

SEQ ID NO: 3346 - protein, 7 aa, synthetic construct
KVSNRFS

SEQ ID NO: 3347 - protein, 9 aa, synthetic construct
SQSTHVPWT

SEQ ID NO: 3348 - protein, 118 aa, synthetic construct
EVQLVQSGAEVKKPGESLKISCKGSGYSFMNYWLGWVRQMPGKGLEWMGDIYPGGDYPTYSEKFKVQVTISADKSISTAYLQLSSLKASDTAMYYCARSGNYDEVAYWGQGTLVTVSS

SEQ ID NO: 3349 - protein, 112 aa, synthetic construct
DIVMTQTPLSLSVTPGQPASISCRSSQSLVHSNGNTYLHWYLQKPGQSPQLLIYKVSNRFSGVPDRFSGSGSGTDFTLKISRVEAEDVGVYYCSQSTHVPWTFGQGTKVEIK

SEQ ID NO: 3350 - protein, 463 aa, synthetic construct
MGWSCIILFLVATATGVHSEVQLVQSGAEVKKPGESLKISCKGSGYSFMNYWLGWVRQMPGKGLEWMGDIYPGGDYPTYSEKFKVQVTISADKSISTAYLQLSSLKASDTAMYYCARSGNYDEVAYWGQGTLVTVSSASTKGPSVFPLAPCSRSTSESTAALGCLVKDYFPEPVTVSWNSGALTSGVHTFPAVLQSSGLYSLSSVVTVPSSSLGTKTYTCNVDHKPSNTKVDKRVESKYGPPCPPCPAPEFEGGPSVFLFPPKPKDTLMISRTPEVTCVVVDVSQEDPEVQFNWYVDGVEVHNAKTKPREEQFNSTYRVVSVLTVLHQDWLNGKEYKCKVSNKGLPSSIEKTISKAKGQPREPQVYTLPPSQEEMTKNQVSLTCLVKGFYPSDIAVEWESNGQPENNYKTTPPVLDSDGSFFLYSRLTVDKSRWQEGNVFSCSVMHEALHNHYTQKSLSLSLG

SEQ ID NO: 3351 - protein, 238 aa, synthetic construct
MGWSCIILFLVATATGVHSDIVMTQTPLSLSVTPGQPASISCRSSQSLVHSNGNTYLHWYLQKPGQSPQLLIYKVSNRFSGVPDRFSGSGSGTDFTLKISRVEAEDVGVYYCSQSTHVPWTFGQGTKVEIKRTVAAPSVFIFPPSDEQLKSGTASVVCLLNNFYPREAKVQWKVDNALQSGNSQESVTEQDSKDSTYSLSSTLTLSKADYEKHKVYACEVTHQGLSSPVTKSFNRGEC

SEQ ID NO: 3352 - protein, 444 aa, synthetic construct
EVQLVQSGAEVKKPGESLKISCKGSGYSFMNYWLGWVRQMPGKGLEWMGDIYPGGDYPTYSEKFKVQVTISADKSISTAYLQLSSLKASDTAMYYCARSGNYDEVAYWGQGTLVTVSSASTKGPSVFPLAPCSRSTSESTAALGCLVKDYFPEPVTVSWNSGALTSGVHTFPAVLQSSGLYSLSSVVTVPSSSLGTKTYTCNVDHKPSNTKVDKRVESKYGPPCPPCPAPEFEGGPSVFLFPPKPKDTLMISRTPEVTCVVVDVSQEDPEVQFNWYVDGVEVHNAKTKPREEQFNSTYRVVSVLTVLHQDWLNGKEYKCKVSNKGLPSSIEKTISKAKGQPREPQVYTLPPSQEEMTKNQVSLTCLVKGFYPSDIAVEWESNGQPENNYKTTPPVLDSDGSFFLYSRLTVDKSRWQEGNVFSCSVMHEALHNHYTQKSLSLSLG

SEQ ID NO: 3353 - protein, 219 aa, synthetic construct
DIVMTQTPLSLSVTPGQPASISCRSSQSLVHSNGNTYLHWYLQKPGQSPQLLIYKVSNRFSGVPDRFSGSGSGTDFTLKISRVEAEDVGVYYCSQSTHVPWTFGQGTKVEIKRTVAAPSVFIFPPSDEQLKSGTASVVCLLNNFYPREAKVQWKVDNALQSGNSQESVTEQDSKDSTYSLSSTLTLSKADYEKHKVYACEVTHQGLSSPVTKSFNRGEC

SEQ ID NO: 3354 - protein, 5 aa, synthetic construct
SYWMH

SEQ ID NO: 3355 - protein, 17 aa, synthetic construct
EINPTNGRTNYIEKFKS

SEQ ID NO: 3356 - protein, 7 aa, synthetic construct
GTRAYHY

SEQ ID NO: 3357 - protein, 11 aa, synthetic construct
RASDNLYSNLA

SEQ ID NO: 3358 - protein, 7 aa, synthetic construct
DATNLAD

SEQ ID NO: 3359 - protein, 9 aa, synthetic construct
QHFWGTPLT

SEQ ID NO: 3360 - protein, 116 aa, synthetic construct
EVQLVQSGAEVKKPGASVKVSCKASGYTFTSYWMHWVRQAPGQRLEWIGEINPTNGRTNYIEKFKSRATLTVDKSASTAYMELSSLRSEDTAVYYCARGTRAYHYWGQGTMVTVSS

SEQ ID NO: 3361 - protein, 110 aa, synthetic construct
DIQMTQSPSSLSASVGDRVTITCRASDNLYSNLAWYQQKPGKSPKLLVYDATNLADGVPSRFSGSGSGTDYSLKINSLQSEDFGTYYCQHFWGTPLTFGAGTKLELKRTV

SEQ ID NO: 3362 - protein, 233 aa, synthetic construct
MGWSCIILFLVATATGVHSEVQLVQSGAEVKKPGASVKVSCKASGYTFTSYWMHWVRQAPGQRLEWIGEINPTNGRTNYIEKFKSRATLTVDKSASTAYMELSSLRSEDTAVYYCARGTRAYHYWGQGTMVTVSSASTKGPSVFPLAPCSRSTSESTAALGCLVKDYFPEPVTVSWNSGALTSGVHTFPAVLQSSGLYSLSSVVTVPSSSLGTKTYTCNVDHKPSNTKVDKRV

SEQ ID NO: 3363 - protein, 233 aa, synthetic construct
MGWSCIILFLVATATGVHSDIQMTQSPSSLSASVGDRVTITCRASDNLYSNLAWYQQKPGKSPKLLVYDATNLADGVPSRFSGSGSGTDYSLKINSLQSEDFGTYYCQHFWGTPLTFGAGTKLELKRTVAAPSVFIFPPSDEQLKSGTASVVCLLNNFYPREAKVQWKVDNALQSGNSQESVTEQDSKDSTYSLSSTLTLSKADYEKHKVYACEVTHQGLSSPVTKSFNRGEC

SEQ ID NO: 3364 - protein, 442 aa, synthetic construct
EVQLVQSGAEVKKPGASVKVSCKASGYTFTSYWMHWVRQAPGQRLEWIGEINPTNGRTNYIEKFKSRATLTVDKSASTAYMELSSLRSEDTAVYYCARGTRAYHYWGQGTMVTVSSASTKGPSVFPLAPCSRSTSESTAALGCLVKDYFPEPVTVSWNSGALTSGVHTFPAVLQSSGLYSLSSVVTVPSSSLGTKTYTCNVDHKPSNTKVDKRVESKYGPPCPPCPAPEFEGGPSVFLFPPKPKDTLMISRTPEVTCVVVDVSQEDPEVQFNWYVDGVEVHNAKTKPREEQFNSTYRVVSVLTVLHQDWLNGKEYKCKVSNKGLPSSIEKTISKAKGQPREPQVYTLPPSQEEMTKNQVSLTCLVKGFYPSDIAVEWESNGQPENNYKTTPPVLDSDGSFFLYSRLTVDKSRWQEGNVFSCSVMHEALHNHYTQKSLSLSLG

SEQ ID NO: 3365 - protein, 214 aa, synthetic construct
DIQMTQSPSSLSASVGDRVTITCRASDNLYSNLAWYQQKPGKSPKLLVYDATNLADGVPSRFSGSGSGTDYSLKINSLQSEDFGTYYCQHFWGTPLTFGAGTKLELKRTVAAPSVFIFPPSDEQLKSGTASVVCLLNNFYPREAKVQWKVDNALQSGNSQESVTEQDSKDSTYSLSSTLTLSKADYEKHKVYACEVTHQGLSSPVTKSFNRGEC

SEQ ID NO: 3366 - protein, 214 aa, synthetic construct
EVQLVQSGAEVKKPGASVKVSCKASGYTFTSYWMHWVRQAPGQRLEWIGEINPTNGRTNYIEKFKSRATLTVDKSASTAYMELSSLRSEDTAVYYCARGTRAYHYWGQGTMVTVSSASTKGPSVFPLAPCSRSTSESTAALGCLVKDYFPEPVTVSWNSGALTSGVHTFPAVLQSSGLYSLSSVVTVPSSSLGTKTYTCNVDHKPSNTKVDKRV

SEQ ID NO: 3367 - protein, 5 aa, synthetic construct
SYWIG

SEQ ID NO: 3368 - protein, 18 aa, synthetic construct
IIYPGDSDTRYSPSFQGQ

SEQ ID NO: 3369 - protein, 13 aa, synthetic construct
FPYDSSGYYSFDY

SEQ ID NO: 3370 - protein, 11 aa, synthetic construct
RASQSISSYLN

SEQ ID NO: 3371 - protein, 7 aa, synthetic construct
AASSLQS

SEQ ID NO: 3372 - protein, 9 aa, synthetic construct
QQSYSTPLT

SEQ ID NO: 3373 - protein, 122 aa, synthetic construct
QVQLVQSGAEVKKPGESLKISCKGSGYSFTSYWIGWVRQMPGKGLEWMGIIYPGDSDTRYSPSFQGQVTISADKSISTAYLQWSSLKASDTAMYYCARFPYDSSGYYSFDYWGQGTLVTVSS

SEQ ID NO: 3374 - protein, 107 aa, synthetic construct [sequence omitted]

SEQ ID NO: 3375 - protein, 5 aa, synthetic construct
DDYMY

SEQ ID NO: 3376 - protein, 17 aa, synthetic construct
WIDPENGDTEYASKFQD

SEQ ID NO: 3377 - protein, 8 aa, synthetic construct
WLRRGLDY

SEQ ID NO: 3378 - protein, 16 aa, synthetic construct
RSSKSLLHSNGYTYLF

SEQ ID NO: 3379 - protein, 7 aa, synthetic construct
RMSNLAS

SEQ ID NO: 3380 - protein, 9 aa, synthetic construct
MQHLEYPFT

SEQ ID NO: 3381 - protein, 117 aa, synthetic construct
EVQLQQSGAELVRPGASVKLSCTASGFNIKDDYMYWVKQRPEQGLEWIGWIDPENGDTEYASKFQDKATVTADTSSNTAYLQLSSLTSEDTAVYYCTLWLRRGLDYWGQGTSVTVSS

SEQ ID NO: 3382 - protein, 117 aa, synthetic construct
EVQLVQSGSELKKPGASVKVSCTASGFNIKDDYMYWVRQPPGKGLEWIGWIDPENGDTEYASKFQDRVTVTADTSTNTAYMELSSLRSEDTAVYYCTLWLRRGLDYWGQGTLVTVSS

SEQ ID NO: 3383 - protein, 112 aa, synthetic construct
DIVMTQAAPSVPVTPGESVSISCRSSKSLLHSNGYTYLFWFLQRPGQSPQLLIYRMSNLASGVPDRFSGSGSGTAFTLRISRVEAEDVGVYYCMQHLEYPFTFGGGTKLEIK

SEQ ID NO: 3384 - protein, 111 aa, synthetic construct
DIVMTQSPLSLPVTPGEPASISCRSSKSLLHSNGYTYLFWFQQRPGQSPRLLIYRMSNLASGVPDRFSGSGSGTDFTLKISRVEAEDVGVYYCMQHLEYPFTFGGGTKEIK

SEQ ID NO: 3385 - protein, 17 aa, synthetic construct
WIDPETGDTEYASKFQD

SEQ ID NO: 3386 - protein, 117 aa, synthetic construct
EVQLQQSGAELVRPGASVKLSCTASGFNIKDDYMYWVKQRPEQGLEWIGWIDPETGDTEYASKFQDKATVTADTSSNTAYLQLSSLTSEDTAVYYCTLWLRRGLDYWGQGTSVTVSS

SEQ ID NO: 3387 - protein, 117 aa, synthetic construct
EVQLVQSGSELKKPGASVKVSCTASGFNIKDDYMYWVRQPPGKGLEWIGWIDPETGDTEYASKFQDRVTVTADTSTNTAYMELSSLRSEDTAVYYCTLWLRRGLDYWGQGTLVTVSS

SEQ ID NO: 3388 - protein, 17 aa, synthetic construct
WIDPESGDTEYASKFQD

SEQ ID NO: 3389 - protein, 117 aa, synthetic construct
EVQLQQSGAELVRPGASVKLSCTASGFNIKDDYMYWVKQRPEQGLEWIGWIDPESGDTEYASKFQDKATVTADTSSNTAYLQLSSLTSEDTAVYYCTLWLRRGLDYWGQGTSVTVSS

SEQ ID NO: 3390 - protein, 117 aa, synthetic construct
EVQLVQSGSELKKPGASVKVSCTASGFNIKDDYMYWVRQPPGKGLEWIGWIDPESGDTEYASKFQDRVTVTADTSTNTAYMELSSLRSEDTAVYYCTLWLRRGLDYWGQGTLVTVSS

SEQ ID NO: 3391 - protein, 6 aa, synthetic construct
SGYYWN

SEQ ID NO: 3392 - protein, 16 aa, synthetic construct
YITFDGANNYNPSLKN

SEQ ID NO: 3393 - protein, 10 aa, synthetic construct
SSYDYDVLDY

SEQ ID NO: 3394 - protein, 11 aa, synthetic construct
RASQDISNFLN

SEQ ID NO: 3395 - protein, 7 aa, synthetic construct
YTSRLHS

SEQ ID NO: 3396 - protein, 9 aa, synthetic construct
QQGHTLPYT

SEQ ID NO: 3397 - protein, 119 aa, synthetic construct
DVQLQESGPGLVKPSQSLSLTCSVTGYSITSGYYWNWIRQFPGNKLEWMGYITFDGANNYNPSLKNRISITRDTSKNQFFLKLTSVTTEDTATYYCTRSSYDYDVLDYWGQGTTLTVSS

SEQ ID NO: 3398 - protein, 119 aa, synthetic construct
QVQLQESGPGLVKPSQTLSLTCSVTGYSITSGYYWNWIRQPPGKGLEWMGYITFDGANNYNPSLKNRVSISRDTSKNQFSLKLSSVTAEDTATYYCTRSSYDYDVLDYWGQGTTVTVSS

SEQ ID NO: 3399 - protein, 119 aa, synthetic construct
QVQLQESGPGLVKPSQTLSLTCTVTGYSITSGYYWNWIRQPPGKGLEWIGYITFDGANNYNPSLKNRVSISRDTSKNQFSLKLSSVTAEDTATYYCTRSSYDYDVLDYWGQGTTVTVSS

SEQ ID NO: 3400 - protein, 107 aa, synthetic construct
DIQMTQTTSSLSASLGDRVTISCRASQDISNFLNWYQQRPDGTVKLLIYYTSRLHSGVPSRFSGSGSGTDFSLTVSNLEQEDIATYFCQQGHTLPYTFGGGTKLEIK

SEQ ID NO: 3401 - protein, 107 aa, synthetic construct
DIQMTQSPSSLSASVGDRVTITCRASQDISNFLNWYQQKPGQPVKLLIYYTSRLHSGVPSRFSGSGSGTDFTLTISSLQPEDFATYFCQQGHTLPYTFGQGTKLEIK

SEQ ID NO: 3402 - protein, 107 aa, synthetic construct
DIQMTQSPSSLSASVGDRVTITCRASQDISNFLNWYQQKPGQPVKLLIYYTSRLHSGVPSRFSGSGSGTDFTLTISSLQPEDFATYYCQQGHTLPYTFGQGTKLEIK

SEQ ID NO: 3403 - protein, 5 aa, synthetic construct
DYCIN

SEQ ID NO: 3404 - protein, 17 aa, synthetic construct
WIYPGSGNTRYSERFKG

SEQ ID NO: 3405 - protein, 11 aa, synthetic construct
EDYYPYHGMDY

SEQ ID NO: 3406 - protein, 15 aa, synthetic construct
RASESVDGYDNSFMH

SEQ ID NO: 3407 - protein, 7 aa, synthetic construct
RASNLES

SEQ ID NO: 3408 - protein, 9 aa, synthetic construct
QQSSEDPWT

SEQ ID NO: 3409 - protein, 120 aa, synthetic construct
QIQLQQSGPELVRPGASVKISCKASGYSFTDYCINWVNQRPGQGLEWIGWIYPGSGNTRYSERFKGKATLTVDTSSNTAYMQLSSLTSEDSAVYFCAREDYYPYHGMDYWGQGTSVTVSS

SEQ ID NO: 3410 - protein, 111 aa, synthetic construct
DIVLTQSPTSLAVSLGQRATISCRASESVDGYDNSFMHWYQQKPGQPPKLLIFRASNLESGIPARFSGSGSRTDFTLTINPVEAADVATYYCQQSSEDPWTFGGGTKLEIK

SEQ ID NO: 3411 - protein, 5 aa, synthetic construct
DYYIN

SEQ ID NO: 3412 - protein, 120 aa, synthetic construct
QIQLQQSGPELVRPGASVKISCKASGYSFTDYYINWVNQRPGQGLEWIGWIYPGSGNTRYSERFKGKATLTVDTSSNTAYMQLSSLTSEDSAVYFCAREDYYPYHGMDYWGQGTSVTVSS

SEQ ID NO: 3413 - protein, 5 aa, synthetic construct
DYDIN

SEQ ID NO: 3414 - protein, 120 aa, synthetic construct
QIQLQQSGPELVRPGASVKISCKASGYSFTDYDINWVNQRPGQGLEWIGWIYPGSGNTRYSERFKGKATLTVDTSSNTAYMQLSSLTSEDSAVYFCAREDYYPYHGMDYWGQGTSVTVSS

SEQ ID NO: 3415 - protein, 5 aa, synthetic construct
NYYMH

SEQ ID NO: 3416 - protein, 17 aa, synthetic construct
WIYPGDGNTHYNEKFKG

SEQ ID NO: 3417 - protein, 10 aa, synthetic construct
DNSGYVGFPY

SEQ ID NO: 3418 - protein, 17 aa, synthetic construct
KSSQSLFNSANQENYLT

SEQ ID NO: 3419 - protein, 7 aa, synthetic construct
WASTRDS

SEQ ID NO: 3420 - protein, 9 aa, synthetic construct
QNDYSYPLT

SEQ ID NO: 3421 - protein, 119 aa, synthetic construct
EVQLQQSGPELVKPGTSMNISCKASGYTFTNYYMHWVRQRPGQGLEWIGWIYPGDGNTHYNEKFKGKTTLTADTSSITAYMLLSSLTSEDSAVYFCARDNSGYVGFPYWGQGTTLTVSS

SEQ ID NO: 3422 - protein, 114 aa, synthetic construct
MDIKMTQSPSSLTVTAGERVTMSCKSSQSLFNSANQENYLTWYQQRPGQPPKLLIYWASTRDSGVPDRFTGSGSGTDFPLTISSVQAEDLAVYYCQNDYSYPLTFGAGTKLEIK

SEQ ID NO: 3423 - protein, 5 aa, synthetic construct
SYAMS

SEQ ID NO: 3424 - protein, 16 aa, synthetic construct
YIWSGGSTDYASWAKS

SEQ ID NO: 3425 - protein, 17 aa, synthetic construct
RYGTSYPDYGDASGFDP

SEQ ID NO: 3426 - protein, 11 aa, synthetic construct
RASQSISSYLA

SEQ ID NO: 3427 - protein, 7 aa, synthetic construct
RASTLAS

SEQ ID NO: 3428 - protein, 12 aa, synthetic construct
QQNYASSNVDNT

SEQ ID NO: 3429 - protein, 122 aa, synthetic construct
QSMQESGPGLVKPSQTLSLTCTVSGFSLSSYAMSWIRQHPGKGLEWIGYIWSGGSTDYASWAKSRVTISKTSTTVSLKLSSVTAADTAVYYCARRYGTSYPDYGDASGFDPWGQGTLVTVSS

SEQ ID NO: 3430 - protein, 110 aa, synthetic construct
AIQLTQSPSSLSASVGDRVTITCRASQSISSYLAWYQQKPGKAPKLLIYRASTLASGVPSRFSGSGSGTDFTLTISSLQPEDFATYYCQQNYASSNVDNTFGGGTKVEIK

SEQ ID NO: 3431 - protein, 6 aa, synthetic construct
NSYWIC

SEQ ID NO: 3432 - protein, 17 aa, synthetic construct
CINTDADSTNYASWARG

SEQ ID NO: 3433 - protein, 11 aa, synthetic construct
QNNVFDPGYNL

SEQ ID NO: 3434 - protein, 11 aa, synthetic construct
RASQNIGSNLA

SEQ ID NO: 3435 - protein, 7 aa, synthetic construct
DASKLES

SEQ ID NO: 3436 - protein, 12 aa, synthetic construct
QCTVRGGAYGNA

SEQ ID NO: 3437 - protein, 119 aa, synthetic construct
QSLVESGGGVVQPGRSLRLSCKASGFSFSNSYWICWVRQAPGKGLEWVGCINTDADSTNYASWARGRFTISKTSSTTVYLQMNSLRAEDTAVYYCARQNNVFDPGYNLWGPGTLVTVSS

SEQ ID NO: 3438 - protein, 110 aa, synthetic construct
ELVLTQSPSTLSASVGDRVTITCRASQNIGSNLAWYQQKPGKAPKLLIYDASKLESGVPSRFSGSGSGTEFTLTISSLQPDDFATYYCQCTVRGGAYGNAFGGGTKVEIK

SEQ ID NO: 3439 - protein, 116 aa, synthetic construct
QVQLQQPGAELVKPGASVKLSCKASGYTFTSYWMHWVKQRPGQGLEWIGEINPTNGRTNYIEKFKSKATLTVDKSSSTAYMQLSSLTSEDSAVYYCARGTRAYHYWGQGTSVTVSS

SEQ ID NO: 3440 - protein, 107 aa, synthetic construct
DIQMTQSPASLSVSVGETVTITCRASDNLYSNLAWYQQKQGKSPQLLVYDATNLADGVPSRFSGSGSGTQYSLKINSLQSEDFGTYYCQHFWGTPLTFGAGTKLELK

SEQ ID NO: 3441 - protein, 5 aa, synthetic construct
NYWMH

SEQ ID NO: 3442 - protein, 17 aa, synthetic construct
EINPINGRSNYAQKFQG

SEQ ID NO: 3443 - protein, 7 aa, synthetic construct
GTRAMHY

SEQ ID NO: 3444 - protein, 11 aa, synthetic construct
RTSENIYNNLA

SEQ ID NO: 3445 - protein, 7 aa, synthetic construct
AATNLAD

SEQ ID NO: 3446 - protein, 116 aa, synthetic construct
QVQLVQSGAEVKKPGASVKVSCKASGYTFTNYWMHWVRQAPGQGLEWIGEINPINGRSNYAEKFQGRVTLTVDTSSSTAYMELSRLRSDDTAVYYCARGTRAMHYWGQGTLVTVSS

SEQ ID NO: 3447 - protein, 107 aa, synthetic construct
DIQMTQSPSSLSASVGDRVTITCRTSENIYNNLAWYQQKPGKAPKLLIYAATNLADGVPSRFSGSGSGTDYTLTISSLQPEDFATYYCQHFWGTPLTFGGGTKVEIK

SEQ ID NO: 3448 - protein, 17 aa, synthetic construct
EINPIQGRSNYAEKFQG

SEQ ID NO: 3449 - protein, 7 aa, synthetic construct
AATNLAE

SEQ ID NO: 3450 - protein, 10 aa, synthetic construct
QHFWGTPLTF

SEQ ID NO: 3451 - protein, 116 aa, synthetic construct
QVQLVQSGAEVKKPGASVKVSCKASGYTFTNYWMHWVRQAPGQGLEWMGEINPIQGRSNYAEKFQGRVTLTVDTSSSTAYMELSSLRSEDTATYYCARGTRAMHYWGQGTLVTVSS

SEQ ID NO: 3452 - protein, 107 aa, synthetic construct
DIQMTQSPSSLSASVGDRVTITCRTSENIYNNLAWYQQKPGKAPKLLIYAATNLAEGVPSRFSGSGSGTDYTLTISSLQPEDFATYYCQHFWGTPLTFGGGTKVEIK

SEQ ID NO: 3453 - protein, 17 aa, synthetic construct
AIYPGNSETGYAQKFQG

SEQ ID NO: 3454 - protein, 9 aa, synthetic construct
ENWDPGFAF

SEQ ID NO: 3455 - protein, 9 aa, synthetic construct
SASSSVYYM

SEQ ID NO: 3456 - protein, 7 aa, synthetic construct
STSNLAS

SEQ ID NO: 3457 - protein, 9 aa, synthetic construct
QQRRNYPYT

SEQ ID NO: 3458 - protein, 118 aa, synthetic construct
QVQLVQSGAEVKKPGASVKMSCKASGYTFTSYWMHWVRQAPGQGLEWIGAIYPGNSETGYAQKFQGRATLTADTSTSTAYMELSSLRSEDTAVYYCTRENWDPGFAFWGQGTLITVSS

SEQ ID NO: 3459 - protein, 106 aa, synthetic construct
DIQMTQSPSSLSASVGDRVTITCSASSSVYYMYWFQQKPGKAPKLWIYSTSNLASGVPSRFSGSGSGTDYTLTISSMQPEDFATYYCQQRRNYPYTFGQGTKLEIK

SEQ ID NO: 3460 - protein, 106 aa, synthetic construct
DIQMTSPSSLSASVGDRVTITCRASDNLYSNLAWYQQKPGKSPKLLVYDATNLADGVPSRFSGSGSGTDYSLKINSLQSEDFGTYYCQHFWGTPLTFGAGTKLELK

SEQ ID NO: 3461 - protein, 98 aa, Homo sapiens
ASTKGPSVFPLAPSSKSTSGGTAALGCLVKDYFPEPVTVSWNSGALTSGVHTFPAVLQSSGLYSLSSVVTVPSSSLGTQTYICNVNHKPSNTKVDKKV

SEQ ID NO: 3462 - protein, 12 aa, Homo sapiens
EPKSCDKTHTCP

SEQ ID NO: 3463 - protein, 113 aa, Homo sapiens
PCPAPELLGGPSVFLFPPKPKDTLMISRTPEVTCVVVDVSHEDPEVKFNWYVDGVEVHNAKTKPREEQYNSTYRVVSVLTVLHQDWLNGKEYKCKVSNKALPAPIEKTISKAK

SEQ ID NO: 3464 - protein, 107 aa, Homo sapiens
GQPREPQVYTLPPSRDELTKNQVSLTCLVKGFYPSDIAVEWESNGQPENNYKTTPPVLDSDGSFFLYSKLTVDKSRWQQGNVFSCSVMHEALHNHYTQKSLSLSPGK

SEQ ID NO: 3465 - protein, 106 aa, Homo sapiens [sequence omitted]

SEQ ID NO: 3466 - protein, 220 aa, Homo sapiens
PCPAPELLGGPSVFLFPPKPKDTLMISRTPEVTCVVVDVSHEDPEVKFNWYVDGVEVHNAKTKPREEQYNSTYRVVSVLTVLHQDWLNGKEYKCKVSNKALPAPIEKTISKAKGQPREPQVYTLPPSRDELTKNQVSLTCLVKGFYPSDIAVEWESNGQPENNYKTTPPVLDSDGSFFLYSKLTVDKSRWQQGNVFSCSVMHEALHNHYTQKSLSLSPGK

SEQ ID NO: 3467 - protein, 219 aa, Homo sapiens
PCPAPELLGGPSVFLFPPKPKDTLMISRTPEVTCVVVDVSHEDPEVKFNWYVDGVEVHNAKTKPREEQYNSTYRVVSVLTVLHQDWLNGKEYKCKVSNKALPAPIEKTISKAKGQPREPQVYTLPPSRDELTKNQVSLTCLVKGFYPSDIAVEWESNGQPENNYKTTPPVLDSDGSFFLYSKLTVDKSRWQQGNVFSCSVMHEALHNHYTQKSLSLSPG

SEQ ID NO: 3468 - protein, 223 aa, Homo sapiens
TCPPCPAPELLGGPSVFLFPPKPKDTLMISRTPEVTCVVVDVSHEDPEVKFNWYVDGVEVHNAKTKPREEQYNSTYRVVSVLTVLHQDWLNGKEYKCKVSNKALPAPIEKTISKAKGQPREPQVYTLPPSRDELTKNQVSLTCLVKGFYPSDIAVEWESNGQPENNYKTTPPVLDSDGSFFLYSKLTVDKSRWQQGNVFSCSVMHEALHNHYTQKSLSLSPGK

SEQ ID NO: 3469 - protein, 222 aa, Homo sapiens
TCPPCPAPELLGGPSVFLFPPKPKDTLMISRTPEVTCVVVDVSHEDPEVKFNWYVDGVEVHNAKTKPREEQYNSTYRVVSVLTVLHQDWLNGKEYKCKVSNKALPAPIEKTISKAKGQPREPQVYTLPPSRDELTKNQVSLTCLVKGFYPSDIAVEWESNGQPENNYKTTPPVLDSDGSFFLYSKLTVDKSRWQQGNVFSCSVMHEALHNHYTQKSLSLSPG

SEQ ID NO: 3470 - protein, 232 aa, Homo sapiens
EPKSCDKTHTCPPCPAPELLGGPSVFLFPPKPKDTLMISRTPEVTCVVVDVSHEDPEVKFNWYVDGVEVHNAKTKPREEQYNSTYRVVSVLTVLHQDWLNGKEYKCKVSNKALPAPIEKTISKAKGQPREPQVYTLPPSRDELTKNQVSLTCLVKGFYPSDIAVEWESNGQPENNYKTTPPVLDSDGSFFLYSKLTVDKSRWQQGNVFSCSVMHEALHNHYTQKSLSLSPGK

SEQ ID NO: 3471 - protein, 231 aa, Homo sapiens
EPKSCDKTHTCPPCPAPELLGGPSVFLFPPKPKDTLMISRTPEVTCVVVDVSHEDPEVKFNWYVDGVEVHNAKTKPREEQYNSTYRVVSVLTVLHQDWLNGKEYKCKVSNKALPAPIEKTISKAKGQPREPQVYTLPPSRDELTKNQVSLTCLVKGFYPSDIAVEWESNGQPENNYKTTPPVLDSDGSFFLYSKLTVDKSRWQQGNVFSCSVMHEALHNHYTQKSLSLSPG

SEQ ID NO: 3472 - protein, 330 aa, Homo sapiens [sequence omitted]

SEQ ID NO: 3473 - protein, 329 aa, Homo sapiens
ASTKGPSVFPLAPSSKSTSGGTAALGCLVKDYFPEPVTVSWNSGALTSGVHTFPAVLQSSGLYSLSSVVTVPSSSLGTQTYICNVNHKPSNTKVDKKVEPKSCDKTHTCPPCPAPELLGGPSVFLFPPKPKDTLMISRTPEVTCVVVDVSHEDPEVKFNWYVDGVEVHNAKTKPREEQYNSTYRVVSVLTVLHQDWLNGKEYKCKVSNKALPAPIEKTISKAKGQPREPQVYTLPPSRDELTKNQVSLTCLVKGFYPSDIAVEWESNGQPENNYKTTPPVLDSDGSFFLYSKLTVDKSRWQQGNVFSCSVMHEALHNHYTQKSLSLSPG

SEQ ID NO: 3474 - protein, 98 aa, Homo sapiens
ASTKGPSVFPLAPCSRSTSESTAALGCLVKDYFPEPVTVSWNSGALTSGVHTFPAVLQSSGLYSLSSVVTVPSSSLGTKTYTCNVDHKPSNTKVDKRV

SEQ ID NO: 3475 - protein, 12 aa, Homo sapiens
ESKYGPPCPSCP

SEQ ID NO: 3476 - protein, 110 aa, Homo sapiens
APEFLGGPSVFLFPPKPKDTLMISRTPEVTCVVVDVSQEDPEVQFNWYVDGVEVHNAKTKPREEQFNSTYRVVSVLTVLHQDWLNGKEYKCKVSNKGLPSSIEKTISKAK

SEQ ID NO: 3477 - protein, 107 aa, Homo sapiens
GQPREPQVYTLPPSQEEMTKNQVSLTCLVKGFYPSDIAVEWESNGQPENNYKTTPPVLDSDGSFFLYSRLTVDKSRWQEGNVFSCSVMHEALHNHYTQKSLSLSLGK

SEQ ID NO: 3478 - protein, 106 aa, Homo sapiens
GQPREPQVYTLPPSQEEMTKNQVSLTCLVKGFYPSDIAVEWESNGQPENNYKTTPPVLDSDGSFFLYSRLTVDKSRWQEGNVFSCSVMHEALHNHYTQKSLSLSLG

SEQ ID NO: 3479 - protein, 217 aa, Homo sapiens
APEFLGGPSVFLFPPKPKDTLMISRTPEVTCVVVDVSQEDPEVQFNWYVDGVEVHNAKTKPREEQFNSTYRVVSVLTVLHQDWLNGKEYKCKVSNKGLPSSIEKTISKAKGQPREPQVYTLPPSQEEMTKNQVSLTCLVKGFYPSDIAVEWESNGQPENNYKTTPPVLDSDGSFFLYSRLTVDKSRWQEGNVFSCSVMHEALHNHYTQKSLSLSLGK

SEQ ID NO: 3480 - protein, 216 aa, Homo sapiens
APEFLGGPSVFLFPPKPKDTLMISRTPEVTCVVVDVSQEDPEVQFNWYVDGVEVHNAKTKPREEQFNSTYRVVSVLTVLHQDWLNGKEYKCKVSNKGLPSSIEKTISKAKGQPREPQVYTLPPSQEEMTKNQVSLTCLVKGFYPSDIAVEWESNGQPENNYKTTPPVLDSDGSFFLYSRLTVDKSRWQEGNVFSCSVMHEALHNHYTQKSLSLSLG

SEQ ID NO: 3481 - protein, 223 aa, Homo sapiens
PCPSCPAPEFLGGPSVFLFPPKPKDTLMISRTPEVTCVVVDVSQEDPEVQFNWYVDGVEVHNAKTKPREEQFNSTYRVVSVLTVLHQDWLNGKEYKCKVSNKGLPSSIEKTISKAKGQPREPQVYTLPPSQEEMTKNQVSLTCLVKGFYPSDIAVEWESNGQPENNYKTTPPVLDSDGSFFLYSRLTVDKSRWQEGNVFSCSVMHEALHNHYTQKSLSLSLGK

SEQ ID NO: 3482 - protein, 222 aa, Homo sapiens
PCPSCPAPEFLGGPSVFLFPPKPKDTLMISRTPEVTCVVVDVSQEDPEVQFNWYVDGVEVHNAKTKPREEQFNSTYRVVSVLTVLHQDWLNGKEYKCKVSNKGLPSSIEKTISKAKGQPREPQVYTLPPSQEEMTKNQVSLTCLVKGFYPSDIAVEWESNGQPENNYKTTPPVLDSDGSFFLYSRLTVDKSRWQEGNVFSCSVMHEALHNHYTQKSLSLSLG

SEQ ID NO: 3483 - protein, 229 aa, Homo sapiens
ESKYGPPCPSCPAPEFLGGPSVFLFPPKPKDTLMISRTPEVTCVVVDVSQEDPEVQFNWYVDGVEVHNAKTKPREEQFNSTYRVVSVLTVLHQDWLNGKEYKCKVSNKGLPSSIEKTISKAKGQPREPQVYTLPPSQEEMTKNQVSLTCLVKGFYPSDIAVEWESNGQPENNYKTTPPVLDSDGSFFLYSRLTVDKSRWQEGNVFSCSVMHEALHNHYTQKSLSLSLGK

SEQ ID NO: 3484 - protein, 228 aa, Homo sapiens
ESKYGPPCPSCPAPEFLGGPSVFLFPPKPKDTLMISRTPEVTCVVVDVSQEDPEVQFNWYVDGVEVHNAKTKPREEQFNSTYRVVSVLTVLHQDWLNGKEYKCKVSNKGLPSSIEKTISKAKGQPREPQVYTLPPSQEEMTKNQVSLTCLVKGFYPSDIAVEWESNGQPENNYKTTPPVLDSDGSFFLYSRLTVDKSRWQEGNVFSCSVMHEALHNHYTQKSLSLSLG

SEQ ID NO: 3485 - protein, 327 aa, Homo sapiens
ASTKGPSVFPLAPCSRSTSESTAALGCLVKDYFPEPVTVSWNSGALTSGVHTFPAVLQSSGLYSLSSVVTVPSSSLGTKTYTCNVDHKPSNTKVDKRVESKYGPPCPSCPAPEFLGGPSVFLFPPKPKDTLMISRTPEVTCVVVDVSQEDPEVQFNWYVDGVEVHNAKTKPREEQFNSTYRVVSVLTVLHQDWLNGKEYKCKVSNKGLPSSIEKTISKAKGQPREPQVYTLPPSQEEMTKNQVSLTCLVKGFYPSDIAVEWESNGQPENNYKTTPPVLDSDGSFFLYSRLTVDKSRWQEGNVFSCSVMHEALHNHYTQKSLSLSLGK

SEQ ID NO: 3486 - protein, 326 aa, Homo sapiens
ASTKGPSVFPLAPCSRSTSESTAALGCLVKDYFPEPVTVSWNSGALTSGVHTFPAVLQSSGLYSLSSVVTVPSSSLGTKTYTCNVDHKPSNTKVDKRVESKYGPPCPSCPAPEFLGGPSVFLFPPKPKDTLMISRTPEVTCVVVDVSQEDPEVQFNWYVDGVEVHNAKTKPREEQFNSTYRVVSVLTVLHQDWLNGKEYKCKVSNKGLPSSIEKTISKAKGQPREPQVYTLPPSQEEMTKNQVSLTCLVKGFYPSDIAVEWESNGQPENNYKTTPPVLDSDGSFFLYSRLTVDKSRWQEGNVFSCSVMHEALHNHYTQKSLSLSLG

SEQ ID NO: 3487 - protein, 107 aa, Homo sapiens [sequence omitted]

SEQ ID NO: 3488 - skipped

SEQ ID NO: 3489 - protein, 106 aa, Homo sapiens
GQPKANPTVTLFPPSSEELQANKATLVCLISDFYPGAVTVAWKADGSPVKAGVETTKPSKQSNNKYAASSYLSLTPEQWKSHRSYSCQVTHEGSTVEKTVAPTECS

SEQ ID NO: 3490 - protein, 220 aa, synthetic construct
PCPAPEAAGGPSVFLFPPKPKDTLMISRTPEVTCVVVDVSHEDPEVKFNWYVDGVEVHNAKTKPREEQYNSTYRVVSVLTVLHQDWLNGKEYKCKVSNKALPAPIEKTISKAKGQPREPQVYTLPPSRDELTKNQVSLTCLVKGFYPSDIAVEWESNGQPENNYKTTPPVLDSDGSFFLYSKLTVDKSRWQQGNVFSCSVMHEALHNHYTQKSLSLSPGK

SEQ ID NO: 3491 - protein, 219 aa, synthetic construct
PCPAPEAAGGPSVFLFPPKPKDTLMISRTPEVTCVVVDVSHEDPEVKFNWYVDGVEVHNAKTKPREEQYNSTYRVVSVLTVLHQDWLNGKEYKCKVSNKALPAPIEKTISKAKGQPREPQVYTLPPSRDELTKNQVSLTCLVKGFYPSDIAVEWESNGQPENNYKTTPPVLDSDGSFFLYSKLTVDKSRWQQGNVFSCSVMHEALHNHYTQKSLSLSPG

SEQ ID NO: 3492 - protein, 220 aa, synthetic construct
PCPAPEAAGGPSVFLFPPKPKDTLMISRTPEVTCVVVDVSHEDPEVKFNWYVDGVEVHNAKTKPREEQYNSTYRVVSVLTVLHQDWLNGKEYKCKVSNKALAAPIEKTISKAKGQPREPQVYTLPPSRDELTKNQVSLTCLVKGFYPSDIAVEWESNGQPENNYKTTPPVLDSDGSFFLYSKLTVDKSRWQQGNVFSCSVMHEALHNHYTQKSLSLSPGK

SEQ ID NO: 3493 - protein, 219 aa, synthetic construct
PCPAPEAAGGPSVFLFPPKPKDTLMISRTPEVTCVVVDVSHEDPEVKFNWYVDGVEVHNAKTKPREEQYNSTYRVVSVLTVLHQDWLNGKEYKCKVSNKALAAPIEKTISKAKGQPREPQVYTLPPSRDELTKNQVSLTCLVKGFYPSDIAVEWESNGQPENNYKTTPPVLDSDGSFFLYSKLTVDKSRWQQGNVFSCSVMHEALHNHYTQKSLSLSPG

SEQ ID NO: 3494 - protein, 220 aa, synthetic construct
PCPAPEAAGGPSVFLFPPKPKDTLMISRTPEVTCVVVDVSHEDPEVKFNWYVDGVEVHNAKTKPREEQYNSTYRVVSVLTVLHQDWLNGKEYKCKVSNKALGAPIEKTISKAKGQPREPQVYTLPPSRDELTKNQVSLTCLVKGFYPSDIAVEWESNGQPENNYKTTPPVLDSDGSFFLYSKLTVDKSRWQQGNVFSCSVMHEALHNHYTQKSLSLSPGK

SEQ ID NO: 3495 - protein, 219 aa, synthetic construct
PCPAPEAAGGPSVFLFPPKPKDTLMISRTPEVTCVVVDVSHEDPEVKFNWYVDGVEVHNAKTKPREEQYNSTYRVVSVLTVLHQDWLNGKEYKCKVSNKALGAPIEKTISKAKGQPREPQVYTLPPSRDELTKNQVSLTCLVKGFYPSDIAVEWESNGQPENNYKTTPPVLDSDGSFFLYSKLTVDKSRWQQGNVFSCSVMHEALHNHYTQKSLSLSPG

SEQ ID NO: 3496 - protein, 223 aa, synthetic construct
TCPPCPAPEAAGGPSVFLFPPKPKDTLMISRTPEVTCVVVDVSHEDPEVKFNWYVDGVEVHNAKTKPREEQYNSTYRVVSVLTVLHQDWLNGKEYKCKVSNKALPAPIEKTISKAKGQPREPQVYTLPPSRDELTKNQVSLTCLVKGFYPSDIAVEWESNGQPENNYKTTPPVLDSDGSFFLYSKLTVDKSRWQQGNVFSCSVMHEALHNHYTQKSLSLSPGK

SEQ ID NO: 3497 - protein, 222 aa, synthetic construct
TCPPCPAPEAAGGPSVFLFPPKPKDTLMISRTPEVTCVVVDVSHEDPEVKFNWYVDGVEVHNAKTKPREEQYNSTYRVVSVLTVLHQDWLNGKEYKCKVSNKALPAPIEKTISKAKGQPREPQVYTLPPSRDELTKNQVSLTCLVKGFYPSDIAVEWESNGQPENNYKTTPPVLDSDGSFFLYSKLTVDKSRWQQGNVFSCSVMHEALHNHYTQKSLSLSPG

SEQ ID NO: 3498 - protein, 223 aa, synthetic construct
TCPPCPAPEAAGGPSVFLFPPKPKDTLMISRTPEVTCVVVDVSHEDPEVKFNWYVDGVEVHNAKTKPREEQYNSTYRVVSVLTVLHQDWLNGKEYKCKVSNKALAAPIEKTISKAKGQPREPQVYTLPPSRDELTKNQVSLTCLVKGFYPSDIAVEWESNGQPENNYKTTPPVLDSDGSFFLYSKLTVDKSRWQQGNVFSCSVMHEALHNHYTQKSLSLSPGK

SEQ ID NO: 3499 - protein, 222 aa, synthetic construct
TCPPCPAPEAAGGPSVFLFPPKPKDTLMISRTPEVTCVVVDVSHEDPEVKFNWYVDGVEVHNAKTKPREEQYNSTYRVVSVLTVLHQDWLNGKEYKCKVSNKALAAPIEKTISKAKGQPREPQVYTLPPSRDELTKNQVSLTCLVKGFYPSDIAVEWESNGQPENNYKTTPPVLDSDGSFFLYSKLTVDKSRWQQGNVFSCSVMHEALHNHYTQKSLSLSPG

SEQ ID NO: 3500 - protein, 223 aa, synthetic construct
TCPPCPAPEAAGGPSVFLFPPKPKDTLMISRTPEVTCVVVDVSHEDPEVKFNWYVDGVEVHNAKTKPREEQYNSTYRVVSVLTVLHQDWLNGKEYKCKVSNKALGAPIEKTISKAKGQPREPQVYTLPPSRDELTKNQVSLTCLVKGFYPSDIAVEWESNGQPENNYKTTPPVLDSDGSFFLYSKLTVDKSRWQQGNVFSCSVMHEALHNHYTQKSLSLSPGK

SEQ ID NO: 3501 - protein, 222 aa, synthetic construct
TCPPCPAPEAAGGPSVFLFPPKPKDTLMISRTPEVTCVVVDVSHEDPEVKFNWYVDGVEVHNAKTKPREEQYNSTYRVVSVLTVLHQDWLNGKEYKCKVSNKALGAPIEKTISKAKGQPREPQVYTLPPSRDELTKNQVSLTCLVKGFYPSDIAVEWESNGQPENNYKTTPPVLDSDGSFFLYSKLTVDKSRWQQGNVFSCSVMHEALHNHYTQKSLSLSPG

SEQ ID NO: 3502 - protein, 232 aa, synthetic construct
EPKSCDKTHTCPPCPAPEAAGGPSVFLFPPKPKDTLMISRTPEVTCVVVDVSHEDPEVKFNWYVDGVEVHNAKTKPREEQYNSTYRVVSVLTVLHQDWLNGKEYKCKVSNKALPAPIEKTISKAKGQPREPQVYTLPPSRDELTKNQVSLTCLVKGFYPSDIAVEWESNGQPENNYKTTPPVLDSDGSFFLYSKLTVDKSRWQQGNVFSCSVMHEALHNHYTQKSLSLSPGK

SEQ ID NO: 3503 - protein, 231 aa, synthetic construct
EPKSCDKTHTCPPCPAPEAAGGPSVFLFPPKPKDTLMISRTPEVTCVVVDVSHEDPEVKFNWYVDGVEVHNAKTKPREEQYNSTYRVVSVLTVLHQDWLNGKEYKCKVSNKALPAPIEKTISKAKGQPREPQVYTLPPSRDELTKNQVSLTCLVKGFYPSDIAVEWESNGQPENNYKTTPPVLDSDGSFFLYSKLTVDKSRWQQGNVFSCSVMHEALHNHYTQKSLSLSPG

SEQ ID NO: 3504 - protein, 232 aa, synthetic construct; identical to SEQ ID NO: 3502

SEQ ID NO: 3505 - protein, 231 aa, synthetic construct; identical to SEQ ID NO: 3503

SEQ ID NO: 3506 - protein, 232 aa, synthetic construct; identical to SEQ ID NO: 3502

SEQ ID NO: 3507 - protein, 231 aa, synthetic construct; identical to SEQ ID NO: 3503

SEQ ID NO: 3508 - protein, 217 aa, synthetic construct
APEAAGGPSVFLFPPKPKDTLMISRTPEVTCVVVDVSQEDPEVQFNWYVDGVEVHNAKTKPREEQFNSTYRVVSVLTVLHQDWLNGKEYKCKVSNKGLPSSIEKTISKAKGQPREPQVYTLPPSQEEMTKNQVSLTCLVKGFYPSDIAVEWESNGQPENNYKTTPPVLDSDGSFFLYSRLTVDKSRWQEGNVFSCSVMHEALHNHYTQKSLSLSLGK

SEQ ID NO: 3509 - protein, 216 aa, synthetic construct
APEAAGGPSVFLFPPKPKDTLMISRTPEVTCVVVDVSQEDPEVQFNWYVDGVEVHNAKTKPREEQFNSTYRVVSVLTVLHQDWLNGKEYKCKVSNKGLPSSIEKTISKAKGQPREPQVYTLPPSQEEMTKNQVSLTCLVKGFYPSDIAVEWESNGQPENNYKTTPPVLDSDGSFFLYSRLTVDKSRWQEGNVFSCSVMHEALHNHYTQKSLSLSLG

SEQ ID NO: 3510 - protein, 223 aa, synthetic construct
PCPSCPAPEAAGGPSVFLFPPKPKDTLMISRTPEVTCVVVDVSQEDPEVQFNWYVDGVEVHNAKTKPREEQFNSTYRVVSVLTVLHQDWLNGKEYKCKVSNKGLPSSIEKTISKAKGQPREPQVYTLPPSQEEMTKNQVSLTCLVKGFYPSDIAVEWESNGQPENNYKTTPPVLDSDGSFFLYSRLTVDKSRWQEGNVFSCSVMHEALHNHYTQKSLSLSLGK

SEQ ID NO: 3511 - protein, 222 aa, synthetic construct
PCPPCPAPEAAGGPSVFLFPPKPKDTLMISRTPEVTCVVVDVSQEDPEVQFNWYVDGVEVHNAKTKPREEQFNSTYRVVSVLTVLHQDWLNGKEYKCKVSNKGLPSSIEKTISKAKGQPREPQVYTLPPSQEEMTKNQVSLTCLVKGFYPSDIAVEWESNGQPENNYKTTPPVLDSDGSFFLYSRLTVDKSRWQEGNVFSCSVMHEALHNHYTQKSLSLSLG

SEQ ID NO: 3512 - protein, 229 aa, synthetic construct
ESKYGPPCPPCPAPEAAGGPSVFLFPPKPKDTLMISRTPEVTCVVVDVSQEDPEVQFNWYVDGVEVHNAKTKPREEQFNSTYRVVSVLTVLHQDWLNGKEYKCKVSNKGLPSSIEKTISKAKGQPREPQVYTLPPSQEEMTKNQVSLTCLVKGFYPSDIAVEWESNGQPENNYKTTPPVLDSDGSFFLYSRLTVDKSRWQEGNVFSCSVMHEALHNHYTQKSLSLSLGK

SEQ ID NO: 3513 - protein, 228 aa, synthetic construct
ESKYGPPCPPCPAPEAAGGPSVFLFPPKPKDTLMISRTPEVTCVVVDVSQEDPEVQFNWYVDGVEVHNAKTKPREEQFNSTYRVVSVLTVLHQDWLNGKEYKCKVSNKGLPSSIEKTISKAKGQPREPQVYTLPPSQEEMTKNQVSLTCLVKGFYPSDIAVEWESNGQPENNYKTTPPVLDSDGSFFLYSRLTVDKSRWQEGNVFSCSVMHEALHNHYTQKSLSLSLG

SEQ ID NO: 3514 - protein, 230 aa, synthetic construct
AESKYGPPCPPCPAPEAAGGPSVFLFPPKPKDTLMISRTPEVTCVVVDVSQEDPEVQFNWYVDGVEVHNAKTKPREEQFNSTYRVVSVLTVLHQDWLNGKEYKCKVSNKGLPSSIEKTISKAKGQPREPQVYTLPPSQEEMTKNQVSLTCLVKGFYPSDIAVEWESNGQPENNYKTTPPVLDSDGSFFLYSRLTVDKSRWQEGNVFSCSVMHEALHNHYTQKSLSLSLGK

SEQ ID NO: 3515 - protein, 229 aa, synthetic construct
AESKYGPPCPPCPAPEAAGGPSVFLFPPKPKDTLMISRTPEVTCVVVDVSQEDPEVQFNWYVDGVEVHNAKTKPREEQFNSTYRVVSVLTVLHQDWLNGKEYKCKVSNKGLPSSIEKTISKAKGQPREPQVYTLPPSQEEMTKNQVSLTCLVKGFYPSDIAVEWESNGQPENNYKTTPPVLDSDGSFFLYSRLTVDKSRWQEGNVFSCSVMHEALHNHYTQKSLSLSLG

SEQ ID NO: 3516 - protein, 220 aa, synthetic construct
PCPAPELLGGPSVFLFPPKPKDTLMISRTPEVTCVVVDVSHEDPEVKFNWYVDGVEVHNAKTKPREEQYNSTYRVVSVLTVLHQDWLNGKEYKCKVSNKALPAPIEKTISKAKGQPREPQVYTLPPSRDELTKNQVSLWCLVKGFYPSDIAVEWESNGQPENNYKTTPPVLDSDGSFFLYSKLTVDKSRWQQGNVFSCSVMHEALHNHYTQKSLSLSPGK

SEQ ID NO: 3517 - protein, 219 aa, synthetic construct
PCPAPELLGGPSVFLFPPKPKDTLMISRTPEVTCVVVDVSHEDPEVKFNWYVDGVEVHNAKTKPREEQYNSTYRVVSVLTVLHQDWLNGKEYKCKVSNKALPAPIEKTISKAKGQPREPQVYTLPPSRDELTKNQVSLWCLVKGFYPSDIAVEWESNGQPENNYKTTPPVLDSDGSFFLYSKLTVDKSRWQQGNVFSCSVMHEALHNHYTQKSLSLSPG

SEQ ID NO: 3518 - protein, 223 aa, synthetic construct
TCPPCPAPELLGGPSVFLFPPKPKDTLMISRTPEVTCVVVDVSHEDPEVKFNWYVDGVEVHNAKTKPREEQYNSTYRVVSVLTVLHQDWLNGKEYKCKVSNKALPAPIEKTISKAKGQPREPQVYTLPPSRDELTKNQVSLWCLVKGFYPSDIAVEWESNGQPENNYKTTPPVLDSDGSFFLYSKLTVDKSRWQQGNVFSCSVMHEALHNHYTQKSLSLSPGK

SEQ ID NO: 3519 - protein, 222 aa, synthetic construct
TCPPCPAPELLGGPSVFLFPPKPKDTLMISRTPEVTCVVVDVSHEDPEVKFNWYVDGVEVHNAKTKPREEQYNSTYRVVSVLTVLHQDWLNGKEYKCKVSNKALPAPIEKTISKAKGQPREPQVYTLPPSRDELTKNQVSLWCLVKGFYPSDIAVEWESNGQPENNYKTTPPVLDSDGSFFLYSKLTVDKSRWQQGNVFSCSVMHEALHNHYTQKSLSLSPG

SEQ ID NO: 3520 - protein, 232 aa, synthetic construct
EPKSCDKTHTCPPCPAPELLGGPSVFLFPPKPKDTLMISRTPEVTCVVVDVSHEDPEVKFNWYVDGVEVHNAKTKPREEQYNSTYRVVSVLTVLHQDWLNGKEYKCKVSNKALPAPIEKTISKAKGQPREPQVYTLPPSRDELTKNQVSLWCLVKGFYPSDIAVEWESNGQPENNYKTTPPVLDSDGSFFLYSKLTVDKSRWQQGNVFSCSVMHEALHNHYTQKSLSLSPGK

SEQ ID NO: 3521 - protein, 231 aa, synthetic construct
EPKSCDKTHTCPPCPAPELLGGPSVFLFPPKPKDTLMISRTPEVTCVVVDVSHEDPEVKFNWYVDGVEVHNAKTKPREEQYNSTYRVVSVLTVLHQDWLNGKEYKCKVSNKALPAPIEKTISKAKGQPREPQVYTLPPSRDELTKNQVSLWCLVKGFYPSDIAVEWESNGQPENNYKTTPPVLDSDGSFFLYSKLTVDKSRWQQGNVFSCSVMHEALHNHYTQKSLSLSPG

SEQ ID NO: 3522 - protein, 330 aa, synthetic construct
ASTKGPSVFPLAPSSKSTSGGTAALGCLVKDYFPEPVTVSWNSGALTSGVHTFPAVLQSSGLYSLSSVVTVPSSSLGTQTYICNVNHKPSNTKVDKKVEPKSCDKTHTCPPCPAPELLGGPSVFLFPPKPKDTLMISRTPEVTCVVVDVSHEDPEVKFNWYVDGVEVHNAKTKPREEQYNSTYRVVSVLTVLHQDWLNGKEYKCKVSNKALPAPIEKTISKAKGQPREPQVYTLPPCRDELTKNQVSLWCLVKGFYPSDIAVEWESNGQPENNYKTTPPVLDSDGSFFLYSKLTVDKSRWQQGNVFSCSVMHEALHNHYTQKSLSLSPGK

SEQ ID NO: 3523 - protein, 329 aa, synthetic construct
ASTKGPSVFPLAPSSKSTSGGTAALGCLVKDYFPEPVTVSWNSGALTSGVHTFPAVLQSSGLYSLSSVVTVPSSSLGTQTYICNVNHKPSNTKVDKKVEPKSCDKTHTCPPCPAPELLGGPSVFLFPPKPKDTLMISRTPEVTCVVVDVSHEDPEVKFNWYVDGVEVHNAKTKPREEQYNSTYRVVSVLTVLHQDWLNGKEYKCKVSNKALPAPIEKTISKAKGQPREPQVYTLPPSRDELTKNQVSLWCLVKGFYPSDIAVEWESNGQPENNYKTTPPVLDSDGSFFLYSKLTVDKSRWQQGNVFSCSVMHEALHNHYTQKSLSLSPG

SEQ ID NO: 3524 - protein, 220 aa, synthetic construct
PCPAPELLGGPSVFLFPPKPKDTLMISRTPEVTCVVVDVSHEDPEVKFNWYVDGVEVHNAKTKPREEQYNSTYRVVSVLTVLHQDWLNGKEYKCKVSNKALPAPIEKTISKAKGQPREPQVYTLPPCRDELTKNQVSLWCLVKGFYPSDIAVEWESNGQPENNYKTTPPVLDSDGSFFLYSKLTVDKSRWQQGNVFSCSVMHEALHNHYTQKSLSLSPGK

SEQ ID NO: 3525 - protein, 219 aa, synthetic construct
PCPAPELLGGPSVFLFPPKPKDTLMISRTPEVTCVVVDVSHEDPEVKFNWYVDGVEVHNAKTKPREEQYNSTYRVVSVLTVLHQDWLNGKEYKCKVSNKALPAPIEKTISKAKGQPREPQVYTLPPCRDELTKNQVSLWCLVKGFYPSDIAVEWESNGQPENNYKTTPPVLDSDGSFFLYSKLTVDKSRWQQGNVFSCSVMHEALHNHYTQKSLSLSPG

SEQ ID NO: 3526 - protein, 223 aa, synthetic construct
TCPPCPAPELLGGPSVFLFPPKPKDTLMISRTPEVTCVVVDVSHEDPEVKFNWYVDGVEVHNAKTKPREEQYNSTYRVVSVLTVLHQDWLNGKEYKCKVSNKALPAPIEKTISKAKGQPREPQVYTLPPCRDELTKNQVSLWCLVKGFYPSDIAVEWESNGQPENNYKTTPPVLDSDGSFFLYSKLTVDKSRWQQGNVFSCSVMHEALHNHYTQKSLSLSPGK

SEQ ID NO: 3527 - protein, 222 aa, synthetic construct
TCPPCPAPELLGGPSVFLFPPKPKDTLMISRTPEVTCVVVDVSHEDPEVKFNWYVDGVEVHNAKTKPREEQYNSTYRVVSVLTVLHQDWLNGKEYKCKVSNKALPAPIEKTISKAKGQPREPQVYTLPPCRDELTKNQVSLWCLVKGFYPSDIAVEWESNGQPENNYKTTPPVLDSDGSFFLYSKLTVDKSRWQQGNVFSCSVMHEALHNHYTQKSLSLSPG

SEQ ID NO: 3528 - protein, 232 aa, synthetic construct
EPKSCDKTHTCPPCPAPELLGGPSVFLFPPKPKDTLMISRTPEVTCVVVDVSHEDPEVKFNWYVDGVEVHNAKTKPREEQYNSTYRVVSVLTVLHQDWLNGKEYKCKVSNKALPAPIEKTISKAKGQPREPQVYTLPPCRDELTKNQVSLWCLVKGFYPSDIAVEWESNGQPENNYKTTPPVLDSDGSFFLYSKLTVDKSRWQQGNVFSCSVMHEALHNHYTQKSLSLSPGK

SEQ ID NO: 3529 - protein, 231 aa, synthetic construct
EPKSCDKTHTCPPCPAPELLGGPSVFLFPPKPKDTLMISRTPEVTCVVVDVSHEDPEVKFNWYVDGVEVHNAKTKPREEQYNSTYRVVSVLTVLHQDWLNGKEYKCKVSNKALPAPIEKTISKAKGQPREPQVYTLPPCRDELTKNQVSLWCLVKGFYPSDIAVEWESNGQPENNYKTTPPVLDSDGSFFLYSKLTVDKSRWQQGNVFSCSVMHEALHNHYTQKSLSLSPG

SEQ ID NO: 3530 - protein, 330 aa, synthetic construct; identical to SEQ ID NO: 3522

SEQ ID NO: 3531 - protein, 329 aa, synthetic construct
ASTKGPSVFPLAPSSKSTSGGTAALGCLVKDYFPEPVTVSWNSGALTSGVHTFPAVLQSSGLYSLSSVVTVPSSSLGTQTYICNVNHKPSNTKVDKKVEPKSCDKTHTCPPCPAPELLGGPSVFLFPPKPKDTLMISRTPEVTCVVVDVSHEDPEVKFNWYVDGVEVHNAKTKPREEQYNSTYRVVSVLTVLHQDWLNGKEYKCKVSNKALPAPIEKTISKAKGQPREPQVYTLPPCRDELTKNQVSLWCLVKGFYPSDIAVEWESNGQPENNYKTTPPVLDSDGSFFLYSKLTVDKSRWQQGNVFSCSVMHEALHNHYTQKSLSLSPG

SEQ ID NO: 3532 - protein, 220 aa, synthetic construct
PCPAPELLGGPSVFLFPPKPKDTLMISRTPEVTCVVVDVSHEDPEVKFNWYVDGVEVHNAKTKPREEQYNSTYRVVSVLTVLHQDWLNGKEYKCKVSNKALPAPIEKTISKAKGQPREPQVYTLPPSRDELTKNQVSLSCAVKGFYPSDIAVEWESNGQPENNYKTTPPVLDSDGSFFLVSKLTVDKSRWQQGNVFSCSVMHEALHNHYTQKSLSLSPGK

SEQ ID NO: 3533 - protein, 219 aa, synthetic construct
PCPAPELLGGPSVFLFPPKPKDTLMISRTPEVTCVVVDVSHEDPEVKFNWYVDGVEVHNAKTKPREEQYNSTYRVVSVLTVLHQDWLNGKEYKCKVSNKALPAPIEKTISKAKGQPREPQVYTLPPSRDELTKNQVSLSCAVKGFYPSDIAVEWESNGQPENNYKTTPPVLDSDGSFFLVSKLTVDKSRWQQGNVFSCSVMHEALHNHYTQKSLSLSPG

SEQ ID NO: 3534 - protein, 223 aa, synthetic construct
TCPPCPAPELLGGPSVFLFPPKPKDTLMISRTPEVTCVVVDVSHEDPEVKFNWYVDGVEVHNAKTKPREEQYNSTYRVVSVLTVLHQDWLNGKEYKCKVSNKALPAPIEKTISKAKGQPREPQVYTLPPSRDELTKNQVSLSCAVKGFYPSDIAVEWESNGQPENNYKTTPPVLDSDGSFFLVSKLTVDKSRWQQGNVFSCSVMHEALHNHYTQKSLSLSPGK

SEQ ID NO: 3535 - protein, 222 aa, synthetic construct
TCPPCPAPELLGGPSVFLFPPKPKDTLMISRTPEVTCVVVDVSHEDPEVKFNWYVDGVEVHNAKTKPREEQYNSTYRVVSVLTVLHQDWLNGKEYKCKVSNKALPAPIEKTISKAKGQPREPQVYTLPPSRDELTKNQVSLSCAVKGFYPSDIAVEWESNGQPENNYKTTPPVLDSDGSFFLVSKLTVDKSRWQQGNVFSCSVMHEALHNHYTQKSLSLSPG

SEQ ID NO: 3536 - protein, 232 aa, synthetic construct
EPKSCDKTHTCPPCPAPELLGGPSVFLFPPKPKDTLMISRTPEVTCVVVDVSHEDPEVKFNWYVDGVEVHNAKTKPREEQYNSTYRVVSVLTVLHQDWLNGKEYKCKVSNKALPAPIEKTISKAKGQPREPQVYTLPPSRDELTKNQVSLSCAVKGFYPSDIAVEWESNGQPENNYKTTPPVLDSDGSFFLVSKLTVDKSRWQQGNVFSCSVMHEALHNHYTQKSLSLSPGK

SEQ ID NO: 3537 - protein, 231 aa, synthetic construct
EPKSCDKTHTCPPCPAPELLGGPSVFLFPPKPKDTLMISRTPEVTCVVVDVSHEDPEVKFNWYVDGVEVHNAKTKPREEQYNSTYRVVSVLTVLHQDWLNGKEYKCKVSNKALPAPIEKTISKAKGQPREPQVYTLPPSRDELTKNQVSLSCAVKGFYPSDIAVEWESNGQPENNYKTTPPVLDSDGSFFLVSKLTVDKSRWQQGNVFSCSVMHEALHNHYTQKSLSLSPG

SEQ ID NO: 3538 - protein, 330 aa, synthetic construct
ASTKGPSVFPLAPSSKSTSGGTAALGCLVKDYFPEPVTVSWNSGALTSGVHTFPAVLQSSGLYSLSSVVTVPSSSLGTQTYICNVNHKPSNTKVDKKVEPKSCDKTHTCPPCPAPELLGGPSVFLFPPKPKDTLMISRTPEVTCVVVDVSHEDPEVKFNWYVDGVEVHNAKTKPREEQYNSTYRVVSVLTVLHQDWLNGKEYKCKVSNKALPAPIEKTISKAKGQPREPQVYTLPPSRDELTKNQVSLSCAVKGFYPSDIAVEWESNGQPENNYKTTPPVLDSDGSFFLVSKLTVDKSRWQQGNVFSCSVMHEALHNHYTQKSLSLSPGK

SEQ ID NO: 3539 - protein, 329 aa, synthetic construct
ASTKGPSVFPLAPSSKSTSGGTAALGCLVKDYFPEPVTVSWNSGALTSGVHTFPAVLQSSGLYSLSSVVTVPSSSLGTQTYICNVNHKPSNTKVDKKVEPKSCDKTHTCPPCPAPELLGGPSVFLFPPKPKDTLMISRTPEVTCVVVDVSHEDPEVKFNWYVDGVEVHNAKTKPREEQYNSTYRVVSVLTVLHQDWLNGKEYKCKVSNKALPAPIEKTISKAKGQPREPQVYTLPPSRDELTKNQVSLSCAVKGFYPSDIAVEWESNGQPENNYKTTPPVLDSDGSFFLVSKLTVDKSRWQQGNVFSCSVMHEALHNHYTQKSLSLSPG

SEQ ID NO: 3540 - protein, 220 aa, synthetic construct; identical to SEQ ID NO: 3532

SEQ ID NO: 3541 - protein, 219 aa, synthetic construct; identical to SEQ ID NO: 3533

SEQ ID NO: 3542 - protein, 223 aa, synthetic construct
TCPPCPAPELLGGPSVFLFPPKPKDTLMISRTPEVTCVVVDVSHEDPEVKFNWYVDGVEVHNAKTKPREEQYNSTYRVVSVLTVLHQDWLNGKEYKCKVSNKALPAPIEKTISKAKGQPREPQVCTLPPSRDELTKNQVSLSCAVKGFYPSDIAVEWESNGQPENNYKTTPPVLDSDGSFFLVSKLTVDKSRWQQGNVFSCSVMHEALHNHYTQKSLSLSPGK

SEQ ID NO: 3543 - protein, 222 aa, synthetic construct
TCPPCPAPELLGGPSVFLFPPKPKDTLMISRTPEVTCVVVDVSHEDPEVKFNWYVDGVEVHNAKTKPREEQYNSTYRVVSVLTVLHQDWLNGKEYKCKVSNKALPAPIEKTISKAKGQPREPQVCTLPPSRDELTKNQVSLSCAVKGFYPSDIAVEWESNGQPENNYKTTPPVLDSDGSFFLVSKLTVDKSRWQQGNVFSCSVMHEALHNHYTQKSLSLSPG

SEQ ID NO: 3544 - protein, 232 aa, synthetic construct
EPKSCDKTHTCPPCPAPELLGGPSVFLFPPKPKDTLMISRTPEVTCVVVDVSHEDPEVKFNWYVDGVEVHNAKTKPREEQYNSTYRVVSVLTVLHQDWLNGKEYKCKVSNKALPAPIEKTISKAKGQPREPQVCTLPPSRDELTKNQVSLSCAVKGFYPSDIAVEWESNGQPENNYKTTPPVLDSDGSFFLVSKLTVDKSRWQQGNVFSCSVMHEALHNHYTQKSLSLSPGK

SEQ ID NO: 3545 - protein, 231 aa, synthetic construct
EPKSCDKTHTCPPCPAPELLGGPSVFLFPPKPKDTLMISRTPEVTCVVVDVSHEDPEVKFNWYVDGVEVHNAKTKPREEQYNSTYRVVSVLTVLHQDWLNGKEYKCKVSNKALPAPIEKTISKAKGQPREPQVCTLPPSRDELTKNQVSLSCAVKGFYPSDIAVEWESNGQPENNYKTTPPVLDSDGSFFLVSKLTVDKSRWQQGNVFSCSVMHEALHNHYTQKSLSLSPG

SEQ ID NO: 3546 - protein, 330 aa, synthetic construct
ASTKGPSVFPLAPSSKSTSGGTAALGCLVKDYFPEPVTVSWNSGALTSGVHTFPAVLQSSGLYSLSSVVTVPSSSLGTQTYICNVNHKPSNTKVDKKVEPKSCDKTHTCPPCPAPELLGGPSVFLFPPKPKDTLMISRTPEVTCVVVDVSHEDPEVKFNWYVDGVEVHNAKTKPREEQYNSTYRVVSVLTVLHQDWLNGKEYKCKVSNKALPAPIEKTISKAKGQPREPQVCTLPPSRDELTKNQVSLSCAVKGFYPSDIAVEWESNGQPENNYKTTPPVLDSDGSFFLVSKLTVDKSRWQQGNVFSCSVMHEALHNHYTQKSLSLSPGK

SEQ ID NO: 3547 - protein, 329 aa, synthetic construct
ASTKGPSVFPLAPSSKSTSGGTAALGCLVKDYFPEPVTVSWNSGALTSGVHTFPAVLQSSGLYSLSSVVTVPSSSLGTQTYICNVNHKPSNTKVDKKVEPKSCDKTHTCPPCPAPELLGGPSVFLFPPKPKDTLMISRTPEVTCVVVDVSHEDPEVKFNWYVDGVEVHNAKTKPREEQYNSTYRVVSVLTVLHQDWLNGKEYKCKVSNKALPAPIEKTISKAKGQPREPQVCTLPPSRDELTKNQVSLSCAVKGFYPSDIAVEWESNGQPENNYKTTPPVLDSDGSFFLVSKLTVDKSRWQQGNVFSCSVMHEALHNHYTQKSLSLSPG

SEQ ID NO: 3548 - RNA, 23 nt, Homo sapiens
  source 1..23: mol_type = genomic RNA
catggattaagaatctacttaga

SEQ ID NO: 3549 - RNA, 23 nt, Homo sapiens
  source 1..23: mol_type = genomic RNA
agcacaaacggaaacaatgcaat

SEQ ID NO: 3550 - RNA, 23 nt, Homo sapiens
  source 1..23: mol_type = genomic RNA
ggacattcttatttttatcgagc

SEQ ID NO: 3551 - RNA, 23 nt, Homo sapiens
  source 1..23: mol_type = genomic RNA
ttgcaaacagccattcaccagtg

SEQ ID NO: 3552 - RNA, 23 nt, Homo sapiens
  source 1..23: mol_type = genomic RNA
acatgtacaacttgcaaacagcc

SEQ ID NO: 3553 - RNA, 23 nt, Homo sapiens
  source 1..23: mol_type = genomic RNA
gcaacacgcacagaacactcatg

SEQ ID NO: 3554 - RNA, 23 nt, Homo sapiens
  source 1..23: mol_type = genomic RNA
cagctacacatgtacaacttgca

SEQ ID NO: 3555 - RNA, 23 nt, Homo sapiens
  source 1..23: mol_type = genomic RNA
tacacatgtacaacttgcaaaca

SEQ ID NO: 3556 - RNA, 23 nt, Homo sapiens
  source 1..23: mol_type = genomic RNA
caacttgcaaacagccattcacc

SEQ ID NO: 3557 - RNA, 23 nt, Homo sapiens
  source 1..23: mol_type = genomic RNA
cacgcacagaacactcatggatt

SEQ ID NO: 3558 - RNA, 23 nt, Homo sapiens
  source 1..23: mol_type = genomic RNA
acattcttatttttatcgagcac

SEQ ID NO: 3559 - RNA, 23 nt, Homo sapiens
  source 1..23: mol_type = genomic RNA
ccagtgcatggtttctcttgcaa

SEQ ID NO: 3560 - RNA, 23 nt, Homo sapiens
  source 1..23: mol_type = genomic RNA
cgtcatctagaggaatttgcccc

SEQ ID NO: 3561 - RNA, 23 nt, Homo sapiens
  source 1..23: mol_type = genomic RNA
tgggcgagaagcataagcgcggc

SEQ ID NO: 3562 - RNA, 23 nt, Homo sapiens
  source 1..23: mol_type = genomic RNA
ttgtaagatgccttttagcgtgt

SEQ ID NO: 3563 - RNA, 23 nt, Homo sapiens
  source 1..23: mol_type = genomic RNA
atgggattcatattgcagacaat

SEQ ID NO: 3564 - RNA, 23 nt, Homo sapiens
  source 1..23: mol_type = genomic RNA
ggattaagaatctacttagaaag

SEQ ID NO: 3565 - RNA, 23 nt, Homo sapiens
  source 1..23: mol_type = genomic RNA
gggaaggacgtttacaaatgtga

SEQ ID NO: 3566 - RNA, 23 nt, Homo sapiens
  source 1..23: mol_type = genomic RNA
atgtgaaatttgtaagatgcctt

SEQ ID NO: 3567 - RNA, 23 nt, Homo sapiens
  source 1..23: mol_type = genomic RNA
agacgttcaaatttcagagcaac

SEQ ID NO: 3568 - RNA, 23 nt, Homo sapiens
  source 1..23: mol_type = genomic RNA
aacactcatggattaagaatcta

SEQ ID NO: 3569 - RNA, 23 nt, Homo sapiens
  source 1..23: mol_type = genomic RNA
atcaacgtcatctagaggaattt

SEQ ID NO: 3570 - RNA, 23 nt, Homo sapiens
  source 1..23: mol_type = genomic RNA
ttctctaggagacttagagagct

SEQ ID NO: 3571 - RNA, 23 nt, Homo sapiens
  source 1..23: mol_type = genomic RNA
gcacagaacactcatggattaag

SEQ ID NO: 3572 - RNA, 23 nt, Homo sapiens
  source 1..23: mol_type = genomic RNA
tttgacagggtgctgcggttgaa

SEQ ID NO: 3573 - RNA, 23 nt, Homo sapiens
  source 1..23: mol_type = genomic RNA
gatcgagtgttgaataatgatat

SEQ ID NO: 3574 - RNA, 23 nt, Homo sapiens
  source 1..23: mol_type = genomic RNA
ggatgacgattgtttatcaacgt

SEQ ID NO: 3575 - RNA, 23 nt, Homo sapiens
  source 1..23: mol_type = genomic RNA
ccatggatttctctaggagactt

SEQ ID NO: 3576 - RNA, 23 nt, Homo sapiens
  source 1..23: mol_type = genomic RNA
gcctccaggcagctcaaagatcc

SEQ ID NO: 3577 - RNA, 23 nt, Homo sapiens
  source 1..23: mol_type = genomic RNA
aactgtagcaatctcactgtcca

SEQ ID NO: 3578 - RNA, 23 nt, Homo sapiens
  source 1..23: mol_type = genomic RNA
atcgagcacaaacggaaacaatg

SEQ ID NO: 3579 - RNA, 23 nt, Homo sapiens
  source 1..23: mol_type = genomic RNA
tatcaacgtcatctagaggaatt

SEQ ID NO: 3580 - RNA, 23 nt, Homo sapiens
  source 1..23: mol_type = genomic RNA
gctgcggttgaatccaatggcta

SEQ ID NO: 3581 - RNA, 23 nt, Homo sapiens
  source 1..23: mol_type = genomic RNA
atgacgattgtttatcaacgtca

SEQ ID NO: 3582 - RNA, 23 nt, Homo sapiens
  source 1..23: mol_type = genomic RNA
tctggagtctccttctttctaac

SEQ ID NO: 3583 - RNA, 23 nt, Homo sapiens
  source 1..23: mol_type = genomic RNA
aatgtgaaatttgtaagatgcct

SEQ ID NO: 3584 - RNA, 23 nt, Homo sapiens
  source 1..23: mol_type = genomic RNA
tgacggctctcccacaattcatc

SEQ ID NO: 3585 - RNA, 23 nt, Homo sapiens
  source 1..23: mol_type = genomic RNA
tgggaaagtcttcaagaactgta

SEQ ID NO: 3586 - RNA, 23 nt, Homo sapiens
  source 1..23: mol_type = genomic RNA
cctccaggcagctcaaagatccc

SEQ ID NO: 3587 - RNA, 23 nt, Homo sapiens
  source 1..23: mol_type = genomic RNA
gaggatgacgattgtttatcaac

SEQ ID NO: 3588 - RNA, 23 nt, Homo sapiens
  source 1..23: mol_type = genomic RNA
tgctgcggttgaatccaatggct

SEQ ID NO: 3589 - RNA, 23 nt, Homo sapiens
  source 1..23: mol_type = genomic RNA
gatgacgattgtttatcaacgtc

SEQ ID NO: 3590 - RNA, 23 nt, Homo sapiens
  source 1..23: mol_type = genomic RNA
gaatccaatggctatggagcctc

SEQ ID NO: 3591 - RNA, 23 nt, Homo sapiens
  source 1..23: mol_type = genomic RNA
aggccttataaatgcgagctgtg

SEQ ID NO: 3592 - RNA, 23 nt, Homo sapiens
  source 1..23: mol_type = genomic RNA
agcacttaagcaaacgggaattc

SEQ ID NO: 3593 - RNA, 23 nt, Homo sapiens
  source 1..23: mol_type = genomic RNA
atggattaagaatctacttagaa

SEQ ID NO: 3594 - RNA, 23 nt, Homo sapiens
  source 1..23: mol_type = genomic RNA
agcaatctcactgtccacaggag

SEQ ID NO: 3595 - RNA, 23 nt, Homo sapiens
  source 1..23: mol_type = genomic RNA
ctaacccggctctcccgatgtga

SEQ ID NO: 3596 - RNA, 23 nt, Homo sapiens
  source 1..23: mol_type = genomic RNA
gaacactcatggattaagaatct

SEQ ID NO: 3597 - RNA, 23 nt, Homo sapiens
  source 1..23: mol_type = genomic RNA
gccatgacggctctcccacaatt

SEQ ID NO: 3598 - RNA, 23 nt, Homo sapiens
  source 1..23: mol_type = genomic RNA
aaggacgtttacaaatgtgaaat

SEQ ID NO: 3599 - RNA, 23 nt, Homo sapiens
  source 1..23: mol_type = genomic RNA
ccatgacggctctcccacaattc

SEQ ID NO: 3600 - RNA, 23 nt, Homo sapiens
  source 1..23: mol_type = genomic RNA
cgagcacaaacggaaacaatgca

SEQ ID NO: 3601 - RNA, 23 nt, Homo sapiens
  source 1..23: mol_type = genomic RNA
agctgtgcaactatgcctgtgcc

SEQ ID NO: 3602 - RNA, 23 nt, Homo sapiens
  source 1..23: mol_type = genomic RNA
tctcgccgcaagcaaggcaaacc

SEQ ID NO: 3603 - RNA, 23 nt, Homo sapiens
  source 1..23: mol_type = genomic RNA
tctcttgcaacacgcacagaaca

SEQ ID NO: 3604 - RNA, 23 nt, Homo sapiens
  source 1..23: mol_type = genomic RNA
caacgtcatctagaggaatttgc

SEQ ID NO: 3605 - RNA, 23 nt, Homo sapiens
  source 1..23: mol_type = genomic RNA
tctctggagtctccttctttcta

SEQ ID NO: 3606 - RNA, 23 nt, Homo sapiens
  source 1..23: mol_type = genomic RNA
tctaacccggctctcccgatgtg

SEQ ID NO: 3607 - RNA, 23 nt, Homo sapiens
  source 1..23: mol_type = genomic RNA
ccagcacttaagcaaacgggaat

SEQ ID NO: 3608 - RNA, 23 nt, Homo sapiens
  source 1..23: mol_type = genomic RNA
acaaacggaaacaatgcaatggc

SEQ ID NO: 3609 - RNA, 23 nt, Homo sapiens
  source 1..23: mol_type = genomic RNA
tcatggattaagaatctacttag

SEQ ID NO: 3610 - RNA, 23 nt, Homo sapiens
  source 1..23: mol_type = genomic RNA
tcacgtccgcacttgaacttgca

SEQ ID NO: 3611 - RNA, 23 nt, Homo sapiens
  source 1..23: mol_type = genomic RNA
aacacatagcagataaacttctg

SEQ ID NO: 3612 - RNA, 23 nt, Homo sapiens
  source 1..23: mol_type = genomic RNA
ggtgctcagctccatgcagcact

SEQ ID NO: 3613 - RNA, 23 nt, Homo sapiens
  source 1..23: mol_type = genomic RNA
acacatagcagataaacttctgc

SEQ ID NO: 3614 - RNA, 23 nt, Homo sapiens
  source 1..23: mol_type = genomic RNA
tggccctggccacccatcacccg

SEQ ID NO: 3615 - RNA, 23 nt, Homo sapiens
  source 1..23: mol_type = genomic RNA
gacggctctcccacaattcatct

SEQ ID NO: 3616 - RNA, 23 nt, Homo sapiens
  source 1..23: mol_type = genomic RNA
aggagaagccacacgggcgaaag

SEQ ID NO: 3617 - RNA, 23 nt, Homo sapiens
  source 1..23: mol_type = genomic RNA
gatggccctggccacccatcacc

SEQ ID NO: 3618 - RNA, 23 nt, Homo sapiens
  source 1..23: mol_type = genomic RNA
agataaacttctgcactggaggg

SEQ ID NO: 3619 - RNA, 23 nt, Homo sapiens
  source 1..23: mol_type = genomic RNA
ttctaacccggctctcccgatgt

SEQ ID NO: 3620 - RNA, 23 nt, Homo sapiens
  source 1..23: mol_type = genomic RNA
ggatttctctaggagacttagag

SEQ ID NO: 3621 - RNA, 23 nt, Homo sapiens
  source 1..23: mol_type = genomic RNA
ccttctttctaacccggctctcc

SEQ ID NO: 3622 - RNA, 23 nt, Homo sapiens
  source 1..23: mol_type = genomic RNA
ctttgacagggtgctgcggttga

SEQ ID NO: 3623 - RNA, 23 nt, Homo sapiens
  source 1..23: mol_type = genomic RNA
ggagcactcctcggagaacggga

SEQ ID NO: 3624 - RNA, 23 nt, Homo sapiens
  source 1..23: mol_type = genomic RNA
ggccctggccacccatcacccga

SEQ ID NO: 3625 - RNA, 23 nt, Homo sapiens
  source 1..23: mol_type = genomic RNA
taagcaaacgggaattctcgccc

SEQ ID NO: 3626 - RNA, 23 nt, Homo sapiens
  source 1..23: mol_type = genomic RNA
gagctggcagggaacacgtctag

SEQ ID NO: 3627 - RNA, 23 nt, Homo sapiens
  source 1..23: mol_type = genomic RNA
agccctatgcaaaggttactgca

SEQ ID NO: 3628 - RNA, 23 nt, Homo sapiens
  source 1..23: mol_type = genomic RNA
attcatcttccctgcgccatctt

SEQ ID NO: 3629 - RNA, 23 nt, Homo sapiens
  source 1..23: mol_type = genomic RNA
tccttctttctaacccggctctc

SEQ ID NO: 3630 - RNA, 23 nt, Homo sapiens
  source 1..23: mol_type = genomic RNA
gtccaccaccgagacatcacttg

SEQ ID NO: 3631 - RNA, 23 nt, Homo sapiens
  source 1..23: mol_type = genomic RNA
gcaaccattccagccaggtagca

SEQ ID NO: 3632 - RNA, 23 nt, Homo sapiens
  source 1..23: mol_type = genomic RNA
catcttccctgcgccatctttgt

SEQ ID NO: 3633 - RNA, 23 nt, Homo sapiens
  source 1..23: mol_type = genomic RNA
ccctggccacccatcacccgagt

SEQ ID NO: 3634 - RNA, 23 nt, Homo sapiens
  source 1..23: mol_type = genomic RNA
aagagggcagacgcagcgacact

SEQ ID NO: 3635 - RNA, 23 nt, Homo sapiens
  source 1..23: mol_type = genomic RNA
cccacaattcatcttccctgcgc

SEQ ID NO: 3636 - RNA, 23 nt, Homo sapiens
  source 1..23: mol_type = genomic RNA
acccatcacccgagtgcctttga

SEQ ID NO: 3637 - RNA, 23 nt, Homo sapiens
  source 1..23: mol_type = genomic RNA
caacacgcacagaacactcatgg

SEQ ID NO: 3638 - RNA, 23 nt, Homo sapiens
  source 1..23: mol_type = genomic RNA
gagaagccacacgggcgaaaggc

SEQ ID NO: 3639 - RNA, 23 nt, Homo sapiens
  source 1..23: mol_type = genomic RNA
cccatcacccgagtgcctttgac

SEQ ID NO: 3640 - RNA, 23 nt, Homo sapiens
  source 1..23: mol_type = genomic RNA
gttcaagttcgcagggacgtcac

SEQ ID NO: 3641 - RNA, 23 nt, Homo sapiens
  source 1..23: mol_type = genomic RNA
tttctaacccggctctcccgatg

SEQ ID NO: 3642 - RNA, 23 nt, Homo sapiens
  source 1..23: mol_type = genomic RNA
acgggaagtggagggagcacgcc

SEQ ID NO: 3643 - RNA, 23 nt, Homo sapiens
  source 1..23: mol_type = genomic RNA
gtctcgccgcaagcaaggcaaac

SEQ ID NO: 3644 - RNA, 23 nt, Homo sapiens
  source 1..23: mol_type = genomic RNA
gagagctggcagggaacacgtct

SEQ ID NO: 3645 - RNA, 23 nt, Homo sapiens
  source 1..23: mol_type = genomic RNA
tcaccagtgcatggtttctcttg

SEQ ID NO: 3646 - RNA, 23 nt, Homo sapiens
  source 1..23: mol_type = genomic RNA
gcgcatcaagctcgagaaggagt

SEQ ID NO: 3647 - RNA, 23 nt, Homo sapiens
  source 1..23: mol_type = genomic RNA
cccttccttagcttcggagactc

SEQ ID NO: 3648 - RNA, 23 nt, Homo sapiens
  source 1..23: mol_type = genomic RNA
cagaggatgacgattgtttatca

SEQ ID NO: 3649 - RNA, 23 nt, Homo sapiens
  source 1..23: mol_type = genomic RNA
tccatccagactcctgacgttca

SEQ ID NO: 3650 - RNA, 23 nt, Homo sapiens
  source 1..23: mol_type = genomic RNA
cacagggacacttgcgacgaaga

SEQ ID NO: 3651 - RNA, 23 nt, Homo sapiens
  source 1..23: mol_type = genomic RNA
tgaccaaaggtcattacaacctg

SEQ ID NO: 3652 - RNA, 23 nt, Homo sapiens
  source 1..23: mol_type = genomic RNA
gacgttcaaatttcagagcaacc

SEQ ID NO: 3653 - RNA, 23 nt, Homo sapiens
  source 1..23: mol_type = genomic RNA
cccagccctatgcaaaggttact

SEQ ID NO: 3654 - RNA, 23 nt, Homo sapiens
  source 1..23: mol_type = genomic RNA
gccacagggacacttgcgacgaa

SEQ ID NO: 3655 - RNA, 23 nt, Homo sapiens
  source 1..23: mol_type = genomic RNA
aagcatccaatcccgtggaggtt

SEQ ID NO: 3656 - RNA, 23 nt, Homo sapiens
  source 1..23: mol_type = genomic RNA
atgcccaacacggagaacgtgta

SEQ ID NO: 3657 - RNA, 23 nt, Homo sapiens
  source 1..23: mol_type = genomic RNA
tcccagccacctctccatgggat

SEQ ID NO: 3658 - RNA, 23 nt, Homo sapiens
  source 1..23: mol_type = genomic RNA
agccacctctccatgggattcat

SEQ ID NO: 3659 - RNA, 23 nt, Homo sapiens
  source 1..23: mol_type = genomic RNA
gccggcccagccctatgcaaagg

SEQ ID NO: 3660 - RNA, 23 nt, Homo sapiens
  source 1..23: mol_type = genomic RNA
ggatttctctaggagacttagag

SEQ ID NO: 3661 - RNA, 23 nt, Homo sapiens
  source 1..23: mol_type = genomic RNA
ccttctttctaacccggctctcc

SEQ ID NO: 3662 - RNA, 23 nt, Homo sapiens
  source 1..23: mol_type = genomic RNA
ctttgacagggtgctgcggttga

SEQ ID NO: 3663 - RNA, 23 nt, Homo sapiens
  source 1..23: mol_type = genomic RNA
ggagcactcctcggagaacggga

SEQ ID NO: 3664 - RNA, 23 nt, Homo sapiens
  source 1..23: mol_type = genomic RNA
tttctcttgcaacacgcacagaa

SEQ ID NO: 3665 - RNA, 23 nt, Homo sapiens
  source 1..23: mol_type = genomic RNA
ggccctggccacccatcacccga

SEQ ID NO: 3666 - RNA, 23 nt, Homo sapiens
  source 1..23: mol_type = genomic RNA
taagcaaacgggaattctcgccc

SEQ ID NO: 3667 - RNA, 23 nt, Homo sapiens
  source 1..23: mol_type = genomic RNA
gagctggcagggaacacgtctag

SEQ ID NO: 3668 - RNA, 23 nt, Homo sapiens
  source 1..23: mol_type = genomic RNA
cggagactccagacaatcgcctt

SEQ ID NO: 3669 - RNA, 23 nt, Homo sapiens
  source 1..23: mol_type = genomic RNA
agccctatgcaaaggttactgca

SEQ ID NO: 3670 - RNA, 23 nt, Homo sapiens
  source 1..23: mol_type = genomic RNA
ctaagaataccaggatcagtatc

SEQ ID NO: 3671 - RNA, 23 nt, Homo sapiens
  source 1..23: mol_type = genomic RNA
attcatcttccctgcgccatctt

SEQ ID NO: 3672 - RNA, 23 nt, Homo sapiens
  source 1..23: mol_type = genomic RNA
tccttctttctaacccggctctc

SEQ ID NO: 3673 - RNA, 23 nt, Homo sapiens
  source 1..23: mol_type = genomic RNA
gtccaccaccgagacatcacttg

SEQ ID NO: 3674 - RNA, 23 nt, Homo sapiens
  source 1..23: mol_type = genomic RNA
gcaaccattccagccaggtagca

SEQ ID NO: 3675 - RNA, 23 nt, Homo sapiens
  source 1..23: mol_type = genomic RNA
catcttccctgcgccatctttgt

SEQ ID NO: 3676 - RNA, 23 nt, Homo sapiens
  source 1..23: mol_type = genomic RNA
ccctggccacccatcacccgagt

SEQ ID NO: 3677 - RNA, 23 nt, Homo sapiens
  source 1..23: mol_type = genomic RNA
aagagggcagacgcagcgacact

SEQ ID NO: 3678 - RNA, 23 nt, Homo sapiens
  source 1..23: mol_type = genomic RNA
cccacaattcatcttccctgcgc

SEQ ID NO: 3679 - RNA, 23 nt, Homo sapiens
  source 1..23: mol_type = genomic RNA
acccatcacccgagtgcctttga

SEQ ID NO: 3680 - RNA, 23 nt, Homo sapiens
  source 1..23: mol_type = genomic RNA
caacacgcacagaacactcatgg

SEQ ID NO: 3681 - RNA, 23 nt, Homo sapiens
  source 1..23: mol_type = genomic RNA
gagaagccacacgggcgaaaggc

SEQ ID NO: 3682 - RNA, 23 nt, Homo sapiens
  source 1..23: mol_type = genomic RNA
cccatcacccgagtgcctttgac

SEQ ID NO: 3683 - RNA, 23 nt, Homo sapiens
  source 1..23: mol_type = genomic RNA
gttcaagttcgcagggacgtcac

SEQ ID NO: 3684 - RNA, 23 nt, Homo sapiens
  source 1..23: mol_type = genomic RNA
tttctaacccggctctcccgatg

SEQ ID NO: 3685 - RNA, 23 nt, Homo sapiens
  source 1..23: mol_type = genomic RNA
acgggaagtggagggagcacgcc

SEQ ID NO: 3686 - RNA, 23 nt, Homo sapiens
  source 1..23: mol_type = genomic RNA
ggcctggcagaagggcgctttcc

SEQ ID NO: 3687 - RNA, 23 nt, Homo sapiens
  source 1..23: mol_type = genomic RNA
gtctcgccgcaagcaaggcaaac

SEQ ID NO: 3688 - RNA, 23 nt, Homo sapiens
  source 1..23: mol_type = genomic RNA
gagagctggcagggaacacgtct

SEQ ID NO: 3689 - RNA, 23 nt, Homo sapiens
  source 1..23: mol_type = genomic RNA
tcaccagtgcatggtttctcttg

SEQ ID NO: 3690 - RNA, 23 nt, Homo sapiens
  source 1..23: mol_type = genomic RNA
gcgcatcaagctcgagaaggagt

SEQ ID NO: 3691 - RNA, 23 nt, Homo sapiens
  source 1..23: mol_type = genomic RNA
cccttccttagcttcggagactc

SEQ ID NO: 3692 - RNA, 23 nt, Homo sapiens
  source 1..23: mol_type = genomic RNA
cagaggatgacgattgtttatca

SEQ ID NO: 3693 - RNA, 23 nt, Homo sapiens
  source 1..23: mol_type = genomic RNA
tccatccagactcctgacgttca

SEQ ID NO: 3694 - RNA, 23 nt, Homo sapiens
  source 1..23: mol_type = genomic RNA
cacagggacacttgcgacgaaga

SEQ ID NO: 3695 - RNA, 23 nt, Homo sapiens
  source 1..23: mol_type = genomic RNA
tgaccaaaggtcattacaacctg

SEQ ID NO: 3696 - RNA, 23 nt, Homo sapiens
  source 1..23: mol_type = genomic RNA
gacgttcaaatttcagagcaacc

SEQ ID NO: 3697 - RNA, 23 nt, Homo sapiens
  source 1..23: mol_type = genomic RNA
ctctccatgggattcatattgca

SEQ ID NO: 3698 - RNA, 23 nt, Homo sapiens
  source 1..23: mol_type = genomic RNA
cccagccctatgcaaaggttact

SEQ ID NO: 3699 - RNA, 23 nt, Homo sapiens
  source 1..23: mol_type = genomic RNA
gccacagggacacttgcgacgaa

SEQ ID NO: 3700 - RNA, 23 nt, Homo sapiens
  source 1..23: mol_type = genomic RNA
gaataccaggatcagtatcgaga

SEQ ID NO: 3701 - RNA, 23 nt, Homo sapiens
  source 1..23: mol_type = genomic RNA
aagcatccaatcccgtggaggtt

SEQ ID NO: 3702 - RNA, 23 nt, Homo sapiens
  source 1..23: mol_type = genomic RNA
atgcccaacacggagaacgtgta

SEQ ID NO: 3703 - RNA, 23 nt, Homo sapiens
  source 1..23: mol_type = genomic RNA
tcccagccacctctccatgggat

SEQ ID NO: 3704 - RNA, 23 nt, Homo sapiens
  source 1..23: mol_type = genomic RNA
acagtgatcgagtgttgaataat

SEQ ID NO: 3705 - RNA, 23 nt, Homo sapiens
  source 1..23: mol_type = genomic RNA
agccacctctccatgggattcat

SEQ ID NO: 3706 - RNA, 23 nt, Homo sapiens
  source 1..23: mol_type = genomic RNA
aagaataccaggatcagtatcga

SEQ ID NO: 3707 - RNA, 23 nt, Homo sapiens
  source 1..23: mol_type = genomic RNA
ggcacagtgatcgagtgttgaat

SEQ ID NO: 3708 - RNA, 23 nt, Homo sapiens
  source 1..23: mol_type = genomic RNA
gccggcccagccctatgcaaagg

SEQ ID NO: 3709 - RNA, 23 nt, Homo sapiens
  source 1..23: mol_type = genomic RNA
atggcacagtgatcgagtgttga

SEQ ID NO: 3710 - RNA, 23 nt, Homo sapiens
  source 1..23: mol_type = genomic RNA
gtcctgggcgagaagcataagcg

SEQ ID NO: 3711 - RNA, 23 nt, Homo sapiens
  source 1..23: mol_type = genomic RNA
actcctgacgttcaagttcgcag

SEQ ID NO: 3712 - RNA, 23 nt, Homo sapiens
  source 1..23: mol_type = genomic RNA
gtgatcgagtgttgaataatgat

SEQ ID NO: 3713 - RNA, 23 nt, Homo sapiens
  source 1..23: mol_type = genomic RNA
tcacgccagaggatgacgattgt

SEQ ID NO: 3714 - RNA, 23 nt, Homo sapiens
  source 1..23: mol_type = genomic RNA
ggattcatattgcagacaataac

SEQ ID NO: 3715 - RNA, 23 nt, Homo sapiens
  source 1..23: mol_type = genomic RNA
gaggttggcatccaggtcacgcc

SEQ ID NO: 3716 - RNA, 23 nt, Homo sapiens
  source 1..23: mol_type = genomic RNA
tggtggccaagttcaagagcgag

SEQ ID NO: 3717 - RNA, 23 nt, Homo sapiens
  source 1..23: mol_type = genomic RNA
aaatggcacagtgatcgagtgtt

SEQ ID NO: 3718 - RNA, 23 nt, Homo sapiens
  source 1..23: mol_type = genomic RNA
cctacaagtgcaacctgtgcgac

SEQ ID NO: 3719 - RNA, 23 nt, Homo sapiens
  source 1..23: mol_type = genomic RNA
aaagatcccttccttagcttcgg

SEQ ID NO: 3720 - RNA, 23 nt, Homo sapiens
  source 1..23: mol_type = genomic RNA
cgcatcaagctcgagaaggagtt

SEQ ID NO: 3721 - RNA, 23 nt, Homo sapiens
  source 1..23: mol_type = genomic RNA
catccagactcctgacgttcaag

SEQ ID NO: 3722 - RNA, 23 nt, Homo sapiens
  source 1..23: mol_type = genomic RNA
gggagctggacggagggatctcg

SEQ ID NO: 3723 - RNA, 23 nt, Homo sapiens
  source 1..23: mol_type = genomic RNA
ccacagggacacttgcgacgaag

SEQ ID NO: 3724 - RNA, 23 nt, Homo sapiens
  source 1..23: mol_type = genomic RNA
tcccttccttagcttcggagact

SEQ ID NO: 3725 - RNA, 23 nt, Homo sapiens
  source 1..23: mol_type = genomic RNA
ccaggtcctgggcgagaagcata

SEQ ID NO: 3726 - RNA, 23 nt, Homo sapiens
  source 1..23: mol_type = genomic RNA
aaatttcagagcaacctggtggt

SEQ ID NO: 3727 - RNA, 23 nt, Homo sapiens
  source 1..23: mol_type = genomic RNA
ccagaggatgacgattgtttatc

SEQ ID NO: 3728 - RNA, 23 nt, Homo sapiens
  source 1..23: mol_type = genomic RNA
cgtggtggccaagttcaagagcg

SEQ ID NO: 3729 - RNA, 23 nt, Homo sapiens
  source 1..23: mol_type = genomic RNA
aggccggcccagccctatgcaaa

SEQ ID NO: 3730 - RNA, 23 nt, Homo sapiens
  source 1..23: mol_type = genomic RNA
attcatattgcagacaataaccc

SEQ ID NO: 3731 - RNA, 23 nt, Homo sapiens
  source 1..23: mol_type = genomic RNA
ccagccacctctccatgggattc

SEQ ID NO: 3732 - RNA, 23 nt, Homo sapiens
  source 1..23: mol_type = genomic RNA
tctctaagcgcatcaagctcgag

SEQ ID NO: 3733 - RNA, 23 nt, Homo sapiens
  source 1..23: mol_type = genomic RNA
gcagggaacacgtctagcccacc

SEQ ID NO: 3734 - RNA, 23 nt, Homo sapiens
  source 1..23: mol_type = genomic RNA
cacctctccatgggattcatatt

SEQ ID NO: 3735 - RNA, 23 nt, Homo sapiens
  source 1..23: mol_type = genomic RNA
gccacctctccatgggattcata

SEQ ID NO: 3736 - RNA, 23 nt, Homo sapiens
  source 1..23: mol_type = genomic RNA
tgggattcatattgcagacaata

SEQ ID NO: 3737 - RNA, 23 nt, Homo sapiens
  source 1..23: mol_type = genomic RNA
cctgtgggcagtgccagatgaac

SEQ ID NO: 3738 - RNA, 23 nt, Homo sapiens
  source 1..23: mol_type = genomic RNA
cagccacctctccatgggattca

SEQ ID NO: 3739 - RNA, 23 nt, Homo sapiens
  source 1..23: mol_type = genomic RNA
gcccaacacggagaacgtgtact

SEQ ID NO: 3740 - RNA, 23 nt, Homo sapiens
  source 1..23: mol_type = genomic RNA
agaataccaggatcagtatcgag

SEQ ID NO: 3741 - RNA, 23 nt, Homo sapiens
  source 1..23: mol_type = genomic RNA
gacctcctcacctgtgggcagtg

SEQ ID NO: 3742 - RNA, 23 nt, Homo sapiens
  source 1..23: mol_type = genomic RNA
cccttctctaagcgcatcaagct

SEQ ID NO: 3743 - RNA, 23 nt, Homo sapiens
  source 1..23: mol_type = genomic RNA
gggcagtgccagatgaacttccc

SEQ ID NO: 3744 - RNA, 23 nt, Homo sapiens
  source 1..23: mol_type = genomic RNA
gattcatattgcagacaataacc

SEQ ID NO: 3745 - RNA, 23 nt, Homo sapiens
  source 1..23: mol_type = genomic RNA
atgaagacgcacatgcacaaatc

SEQ ID NO: 3746 - RNA, 23 nt, Homo sapiens
  source 1..23: mol_type = genomic RNA
gctggcagggaacacgtctagcc

SEQ ID NO: 3747 - RNA, 23 nt, Homo sapiens
  source 1..23: mol_type = genomic RNA
ggctatggagcctcccgccatgg

SEQ ID NO: 3748 - RNA, 23 nt, Homo sapiens
  source 1..23: mol_type = genomic RNA
gtcacgccagaggatgacgattg

SEQ ID NO: 3749 - RNA, 23 nt, Homo sapiens
  source 1..23: mol_type = genomic RNA
gcccagccctatgcaaaggttac

SEQ ID NO: 3750 - RNA, 23 nt, Homo sapiens
  source 1..23: mol_type = genomic RNA
aaccagaccacggcccgttggga

SEQ ID NO: 3751 - RNA, 23 nt, Homo sapiens
  source 1..23: mol_type = genomic RNA
ttctctaagcgcatcaagctcga

SEQ ID NO: 3752 - RNA, 23 nt, Homo sapiens
  source 1..23: mol_type = genomic RNA
agggacacttgcgacgaagactc

SEQ ID NO: 3753 - RNA, 23 nt, Homo sapiens
  source 1..23: mol_type = genomic RNA
gggccacagggacacttgcgacg

SEQ ID NO: 3754 - RNA, 23 nt, Homo sapiens
  source 1..23: mol_type = genomic RNA
aatcccgtggaggttggcatcca

SEQ ID NO: 3755 - RNA, 23 nt, Homo sapiens
  source 1..23: mol_type = genomic RNA
tcctgggcgagaagcataagcgc

SEQ ID NO: 3756 - RNA, 23 nt, Homo sapiens
  source 1..23: mol_type = genomic RNA
cccaacacggagaacgtgtactc

SEQ ID NO: 3757 - RNA, 23 nt, Homo sapiens
  source 1..23: mol_type = genomic RNA
agaccacggcccgttgggagctc

SEQ ID NO: 3758 - RNA, 23 nt, Homo sapiens
  source 1..23: mol_type = genomic RNA
catccaggtcacgccagaggatg

SEQ ID NO: 3759 - RNA, 23 nt, Homo sapiens
  source 1..23: mol_type = genomic RNA
tttagatgaccaaaggtcattac

SEQ ID NO: 3760 - RNA, 23 nt, Homo sapiens
  source 1..23: mol_type = genomic RNA
gagaagcataagcgcggccacct

SEQ ID NO: 3761 - RNA, 23 nt, Homo sapiens
  source 1..23: mol_type = genomic RNA
acaagtgcaacctgtgcgaccac

SEQ ID NO: 3762 - RNA, 23 nt, Homo sapiens
  source 1..23: mol_type = genomic RNA
caagtgcaacctgtgcgaccacg

SEQ ID NO: 3763 - RNA, 23 nt, Homo sapiens
  source 1..23: mol_type = genomic RNA
gccctgcccgacgtcatgcaggg

SEQ ID NO: 3764 - RNA, 23 nt, Homo sapiens
  source 1..23: mol_type = genomic RNA
gactcctgacgttcaagttcgca

SEQ ID NO: 3765 - RNA, 23 nt, Homo sapiens
  source 1..23: mol_type = genomic RNA
aagtgcaacctgtgcgaccacgc

SEQ ID NO: 3766 - RNA, 23 nt, Homo sapiens
  source 1..23: mol_type = genomic RNA
caggtcctgggcgagaagcataa

SEQ ID NO: 3767 - RNA, 23 nt, Homo sapiens
  source 1..23: mol_type = genomic RNA
agggccacagggacacttgcgac

SEQ ID NO: 3768 - RNA, 23 nt, Homo sapiens
  source 1..23: mol_type = genomic RNA
taagaataccaggatcagtatcg

SEQ ID NO: 3769 - RNA, 23 nt, Homo sapiens
  source 1..23: mol_type = genomic RNA
atgaaccagaccacggcccgttg

SEQ ID NO: 3770 - RNA, 23 nt, Homo sapiens
  source 1..23: mol_type = genomic RNA
atggagcctcccgccatggattt

SEQ ID NO: 3771 - RNA, 23 nt, Homo sapiens
  source 1..23: mol_type = genomic RNA
ccagccaggtagcaagccgccct

SEQ ID NO: 3772 - RNA, 23 nt, Homo sapiens
  source 1..23: mol_type = genomic RNA
ccagactcctgacgttcaagttc

SEQ ID NO: 3773 - RNA, 23 nt, Homo sapiens
  source 1..23: mol_type = genomic RNA
ggtcacgccagaggatgacgatt

SEQ ID NO: 3774 - RNA, 23 nt, Homo sapiens
  source 1..23: mol_type = genomic RNA
aggtcacgccagaggatgacgat

SEQ ID NO: 3775 - RNA, 23 nt, Homo sapiens
  source 1..23: mol_type = genomic RNA
catccaatcccgtggaggttggc

SEQ ID NO: 3776 - RNA, 23 nt, Homo sapiens
  source 1..23: mol_type = genomic RNA
accagaccacggcccgttgggag

SEQ ID NO: 3777 - skipped

SEQ ID NO: 3778 - RNA, 23 nt, Homo sapiens
  source 1..23: mol_type = genomic RNA
ttagatgaccaaaggtcattaca

SEQ ID NO: 3779 - RNA, 23 nt, Homo sapiens
  source 1..23: mol_type = genomic RNA
gatcccttccttagcttcggaga

SEQ ID NO: 3780 - RNA, 23 nt, Homo sapiens
  source 1..23: mol_type = genomic RNA
gaacacgtctagcccaccgctgt

SEQ ID NO: 3781 - RNA, 23 nt, Homo sapiens
  source 1..23: mol_type = genomic RNA
atcccttccttagcttcggagac

SEQ ID NO: 3782 - RNA, 23 nt, Homo sapiens
  source 1..23: mol_type = genomic RNA
gatgcccaacacggagaacgtgt

SEQ ID NO: 3783 - RNA, 23 nt, Homo sapiens
  source 1..23: mol_type = genomic RNA
cagtatcgagagaggcttccggc

SEQ ID NO: 3784 - RNA, 23 nt, Homo sapiens
  source 1..23: mol_type = genomic RNA
cacgtctagcccaccgctgtccc

SEQ ID NO: 3785 - RNA, 23 nt, Homo sapiens
  source 1..23: mol_type = genomic RNA
ggaggttggcatccaggtcacgc

SEQ ID NO: 3786 - RNA, 23 nt, Homo sapiens
  source 1..23: mol_type = genomic RNA
gctatggagcctcccgccatgga

SEQ ID NO: 3787 - RNA, 23 nt, Homo sapiens
  source 1..23: mol_type = genomic RNA
ccaatcccgtggaggttggcatc

SEQ ID NO: 3788 - RNA, 23 nt, Homo sapiens
  source 1..23: mol_type = genomic RNA
ggttggcatccaggtcacgccag

SEQ ID NO: 3789 - RNA, 23 nt, Homo sapiens
  source 1..23: mol_type = genomic RNA
tccttagcttcggagactccaga

SEQ ID NO: 3790 - RNA, 23 nt, Homo sapiens
  source 1..23: mol_type = genomic RNA
aacacgtctagcccaccgctgtc

SEQ ID NO: 3791 - RNA, 23 nt, Homo sapiens
  source 1..23: mol_type = genomic RNA
tgaaccagaccacggcccgttgg

SEQ ID NO: 3792 - RNA, 23 nt, Homo sapiens
  source 1..23: mol_type = genomic RNA
ggaacacgtctagcccaccgctg

SEQ ID NO: 3793 - RNA, 23 nt, Homo sapiens
  source 1..23: mol_type = genomic RNA
ctgtccatccagactcctgacgt

SEQ ID NO: 3794 - RNA, 23 nt, Homo sapiens
  source 1..23: mol_type = genomic RNA
ggagctggacggagggatctcgg

SEQ ID NO: 3795 - RNA, 23 nt, Homo sapiens
  source 1..23: mol_type = genomic RNA
ctctaagcgcatcaagctcgaga

SEQ ID NO: 3796 - RNA, 23 nt, Homo sapiens
  source 1..23: mol_type = genomic RNA
aggttggcatccaggtcacgcca

SEQ ID NO: 3797 - RNA, 23 nt, Homo sapiens
  source 1..23: mol_type = genomic RNA
agccaggtagcaagccgcccttc

SEQ ID NO: 3798 - RNA, 23 nt, Homo sapiens
  source 1..23: mol_type = genomic RNA
ccacctctccatgggattcatat

SEQ ID NO: 3799 - RNA, 23 nt, Homo sapiens
  source 1..23: mol_type = genomic RNA
ttccagccaggtagcaagccgcc

SEQ ID NO: 3800 - RNA, 23 nt, Homo sapiens
  source 1..23: mol_type = genomic RNA
acagggacacttgcgacgaagac

SEQ ID NO: 3801 - RNA, 23 nt, Homo sapiens
  source 1..23: mol_type = genomic RNA
ctacaagtgcaacctgtgcgacc

SEQ ID NO: 3802 - RNA, 23 nt, Homo sapiens
  source 1..23: mol_type = genomic RNA
gagctggacggagggatctcggg

SEQ ID NO: 3803 - RNA, 23 nt, Homo sapiens
  source 1..23: mol_type = genomic RNA
ttcaaatttcagagcaacctggt

SEQ ID NO: 3804 - RNA, 23 nt, Homo sapiens
  source 1..23: mol_type = genomic RNA
ctctgtccatccagactcctgac

SEQ ID NO: 3805 - RNA, 23 nt, Homo sapiens
  source 1..23: mol_type = genomic RNA
caatcccgtggaggttggcatcc

SEQ ID NO: 3806 - RNA, 23 nt, Homo sapiens
  source 1..23: mol_type = genomic RNA
cttagcttcggagactccagaca

SEQ ID NO: 3807 - RNA, 23 nt, Homo sapiens
  source 1..23: mol_type = genomic RNA
agtatcgagagaggcttccggcc

SEQ ID NO: 3808 - RNA, 23 nt, Homo sapiens
  source 1..23: mol_type = genomic RNA
gcccgacgtcatgcagggcatgg

SEQ ID NO: 3809 - RNA, 23 nt, Homo sapiens
  source 1..23: mol_type = genomic RNA
tctgtccatccagactcctgacg

SEQ ID NO: 3810 - RNA, 23 nt, Homo sapiens
  source 1..23: mol_type = genomic RNA
cgagggccacagggacacttgcg

SEQ ID NO: 3811 - RNA, 23 nt, Homo sapiens
  source 1..23: mol_type = genomic RNA
gaaccagaccacggcccgttggg

SEQ ID NO: 3812 - RNA, 23 nt, Homo sapiens
  source 1..23: mol_type = genomic RNA
aagcataagcgcggccacctggc

SEQ ID NO: 3813 - RNA, 23 nt, Homo sapiens
  source 1..23: mol_type = genomic RNA
caatggctatggagcctcccgcc

SEQ ID NO: 3814 - RNA, 23 nt, Homo sapiens
  source 1..23: mol_type = genomic RNA
aacaggaacacatagcagataaa

SEQ ID NO: 3815 - RNA, 23 nt, Homo sapiens
  source 1..23: mol_type = genomic RNA
acaggaacacatagcagataaac

SEQ ID NO: 3816 - RNA, 23 nt, Homo sapiens
  source 1..23: mol_type = genomic RNA
caggaacacatagcagataaact

SEQ ID NO: 3817 - RNA, 23 nt, Homo sapiens
  source 1..23: mol_type = genomic RNA
aggaacacatagcagataaactt

SEQ ID NO: 3818 - RNA, 23 nt, Homo sapiens
  source 1..23: mol_type = genomic RNA
ggaacacatagcagataaacttc

SEQ ID NO: 3819 - RNA, 23 nt, Homo sapiens
  source 1..23: mol_type = genomic RNA
agcccagcagctacacatgtaca

SEQ ID NO: 3820 - RNA, 23 nt, Homo sapiens
  source 1..23: mol_type = genomic RNA
cccagcagctacacatgtacaac

SEQ ID NO: 3821 - RNA, 23 nt, Homo sapiens
  source 1..23: mol_type = genomic RNA
cagcagctacacatgtacaactt

SEQ ID NO: 3822 - RNA, 23 nt, Homo sapiens
  source 1..23: mol_type = genomic RNA
gcagctacacatgtacaacttgc

SEQ ID NO: 3823 - RNA, 23 nt, Homo sapiens
  source 1..23: mol_type = genomic RNA
agctacacatgtacaacttgcaa

SEQ ID NO: 3824 - RNA, 23 nt, Homo sapiens
  source 1..23: mol_type = genomic RNA
gctacacatgtacaacttgcaaa

SEQ ID NO: 3825 - RNA, 23 nt, Homo sapiens
  source 1..23: mol_type = genomic RNA
acacatgtacaacttgcaaacag

SEQ ID NO: 3826 - RNA, 23 nt, Homo sapiens
  source 1..23: mol_type = genomic RNA
cacatgtacaacttgcaaacagc

SEQ ID NO: 3827 - RNA, 23 nt, Homo sapiens
  source 1..23: mol_type = genomic RNA
acatgtacaacttgcaaacagcc

SEQ ID NO: 3828 - RNA, 23 nt, Homo sapiens
  source 1..23: mol_type = genomic RNA
catgtacaacttgcaaacagcca

SEQ ID NO: 3829 - RNA, 23 nt, Homo sapiens
  source 1..23: mol_type = genomic RNA
atgtacaacttgcaaacagccat

SEQ ID NO: 3830 - RNA, 23 nt, Homo sapiens
  source 1..23: mol_type = genomic RNA
tgtacaacttgcaaacagccatt

SEQ ID NO: 3831 - RNA, 23 nt, Homo sapiens
  source 1..23: mol_type = genomic RNA
gtacaacttgcaaacagccattc

SEQ ID NO: 3832 - RNA, 23 nt, Homo sapiens
  source 1..23: mol_type = genomic RNA
tacaacttgcaaacagccattca

SEQ ID NO: 3833 - RNA, 23 nt, Homo sapiens
  source 1..23: mol_type = genomic RNA
acaacttgcaaacagccattcac

SEQ ID NO: 3834 - RNA, 23 nt, Homo sapiens
  source 1..23: mol_type = genomic RNA
caacttgcaaacagccattcacc

SEQ ID NO: 3835 - RNA, 23 nt, Homo sapiens
  source 1..23: mol_type = genomic RNA
aacttgcaaacagccattcacca

SEQ ID NO: 3836 - RNA, 23 nt, Homo sapiens
  source 1..23: mol_type = genomic RNA
acttgcaaacagccattcaccag

SEQ ID NO: 3837 - RNA, 23 nt, Homo sapiens
  source 1..23: mol_type = genomic RNA
cttgcaaacagccattcaccagt

SEQ ID NO: 3838 - RNA, 23 nt, Homo sapiens
  source 1..23: mol_type = genomic RNA
ttgcaaacagccattcaccagtg

SEQ ID NO: 3839 - RNA, 23 nt, Homo sapiens
  source 1..23: mol_type = genomic RNA
tgcaaacagccattcaccagtgc

SEQ ID NO: 3840 - RNA, 23 nt, Homo sapiens
  source 1..23: mol_type = genomic RNA
gcaaacagccattcaccagtgca

SEQ ID NO: 3841 - RNA, 23 nt, Homo sapiens
  source 1..23: mol_type = genomic RNA
caaacagccattcaccagtgcat

SEQ ID NO: 3842 - RNA, 23 nt, Homo sapiens
  source 1..23: mol_type = genomic RNA
aaacagccattcaccagtgcatg

SEQ ID NO: 3843 - RNA, 23 nt, Homo sapiens
  source 1..23: mol_type = genomic RNA
aacagccattcaccagtgcatgg

SEQ ID NO: 3844 - RNA, 23 nt, Homo sapiens
  source 1..23: mol_type = genomic RNA
acagccattcaccagtgcatggt

SEQ ID NO: 3845 - RNA, 23 nt, Homo sapiens
  source 1..23: mol_type = genomic RNA
cagccattcaccagtgcatggtt

SEQ ID NO: 3846 - RNA, 23 nt, Homo sapiens
  source 1..23: mol_type = genomic RNA
agccattcaccagtgcatggttt

SEQ ID NO: 3847 - RNA, 23 nt, Homo sapiens
  source 1..23: mol_type = genomic RNA
gccattcaccagtgcatggtttc

SEQ ID NO: 3848 - RNA, 23 nt, Homo sapiens
  source 1..23: mol_type = genomic RNA
ccattcaccagtgcatggtttct

SEQ ID NO: 3849 - RNA, 23 nt, Homo sapiens
  source 1..23: mol_type = genomic RNA
cattcaccagtgcatggtttctc

SEQ ID NO: 3850 - RNA, 23 nt, Homo sapiens
  source 1..23: mol_type = genomic RNA
attcaccagtgcatggtttctct

SEQ ID NO: 3851 - RNA, 23 nt, Homo sapiens
  source 1..23: mol_type = genomic RNA
ttcaccagtgcatggtttctctt

SEQ ID NO: 3852 - RNA, 23 nt, Homo sapiens
  source 1..23: mol_type = genomic RNA
tcaccagtgcatggtttctcttg

SEQ ID NO: 3853 - RNA, 23 nt, Homo sapiens
  source 1..23: mol_type = genomic RNA
ccagtgcatggtttctcttgcaa

SEQ ID NO: 3854 - RNA, 23 nt, Homo sapiens
  source 1..23: mol_type = genomic RNA
atggtttctcttgcaacacgcac

SEQ ID NO: 3855 - RNA, 23 nt, Homo sapiens
  source 1..23: mol_type = genomic RNA
tggtttctcttgcaacacgcaca

SEQ ID NO: 3856 - RNA, 23 nt, Homo sapiens
  source 1..23: mol_type = genomic RNA
gtttctcttgcaacacgcacaga

SEQ ID NO: 3857 - RNA, 23 nt, Homo sapiens
  source 1..23: mol_type = genomic RNA
tttctcttgcaacacgcacagaa

SEQ ID NO: 3858 - RNA, 23 nt, Homo sapiens
  source 1..23: mol_type = genomic RNA
ctcttgcaacacgcacagaacac

SEQ ID NO: 3859 - RNA, 23 nt, Homo sapiens
  source 1..23: mol_type = genomic RNA
tcttgcaacacgcacagaacact

SEQ ID NO: 3860 - RNA, 23 nt, Homo sapiens
  source 1..23: mol_type = genomic RNA
cttgcaacacgcacagaacactc

SEQ ID NO: 3861 - RNA, 23 nt, Homo sapiens
  source 1..23: mol_type = genomic RNA
ttgcaacacgcacagaacactca

SEQ ID NO: 3862 - RNA, 23 nt, Homo sapiens
  source 1..23: mol_type = genomic RNA
tgcaacacgcacagaacactcat

SEQ ID NO: 3863 - RNA, 23 nt, Homo sapiens
  source 1..23: mol_type = genomic RNA
caacacgcacagaacactcatgg

SEQ ID NO: 3864 - RNA, 23 nt, Homo sapiens
  source 1..23: mol_type = genomic RNA
aacacgcacagaacactcatgga

SEQ ID NO: 3865 - RNA, 23 nt, Homo sapiens
  source 1..23: mol_type = genomic RNA
acacgcacagaacactcatggat

SEQ ID NO: 3866 - RNA, 23 nt, Homo sapiens
  source 1..23: mol_type = genomic RNA
cacgcacagaacactcatggatt

SEQ ID NO: 3867 - RNA, 23 nt, Homo sapiens
  source 1..23: mol_type = genomic RNA
acgcacagaacactcatggatta

SEQ ID NO: 3868 - RNA, 23 nt, Homo sapiens
  source 1..23: mol_type = genomic RNA
cgcacagaacactcatggattaa

SEQ ID NO: 3869 - RNA, 23 nt, Homo sapiens
  source 1..23: mol_type = genomic RNA
gcacagaacactcatggattaag

SEQ ID NO: 3870 - RNA, 23 nt, Homo sapiens
  source 1..23: mol_type = genomic RNA
cacagaacactcatggattaaga

SEQ ID NO: 3871 - RNA, 23 nt, Homo sapiens
  source 1..23: mol_type = genomic RNA
acagaacactcatggattaagaa

SEQ ID NO: 3872 - RNA, 23 nt, Homo sapiens
  source 1..23: mol_type = genomic RNA
cagaacactcatggattaagaat

SEQ ID NO: 3873 - RNA, 23 nt, Homo sapiens
  source 1..23: mol_type = genomic RNA
agaacactcatggattaagaatc

SEQ ID NO: 3874 - RNA, 23 nt, Homo sapiens
  source 1..23: mol_type = genomic RNA
gattaagaatctacttagaaagc

SEQ ID NO: 3875 - RNA, 23 nt, Homo sapiens
  source 1..23: mol_type = genomic RNA
cgggttggtatcccttcaggact

SEQ ID NO: 3876 - RNA, 23 nt, Homo sapiens
  source 1..23: mol_type = genomic RNA
gggttggtatcccttcaggacta

SEQ ID NO: 3877 - RNA, 23 nt, Homo sapiens
  source 1..23: mol_type = genomic RNA
ggttggtatcccttcaggactag

SEQ ID NO: 3878 - RNA, 23 nt, Homo sapiens
  source 1..23: mol_type = genomic RNA
gttggtatcccttcaggactagg

SEQ ID NO: 3879 - RNA, 23 nt, Homo sapiens
  source 1..23: mol_type = genomic RNA
ttggtatcccttcaggactaggt

SEQ ID NO: 3880 - RNA, 23 nt, Homo sapiens
  source 1..23: mol_type = genomic RNA
gtatcccttcaggactaggtgca

SEQ ID NO: 3881 - RNA, 23 nt, Homo sapiens
  source 1..23: mol_type = genomic RNA
tcccttcaggactaggtgcagaa

SEQ ID NO: 3882 - RNA, 23 nt, Homo sapiens
  source 1..23: mol_type = genomic RNA
ccttcaggactaggtgcagaatg

SEQ ID NO: 3883 - RNA, 23 nt, Homo sapiens
  source 1..23: mol_type = genomic RNA
cttcaggactaggtgcagaatgt

SEQ ID NO: 3884 - RNA, 23 nt, Homo sapiens
  source 1..23: mol_type = genomic RNA
ttcaggactaggtgcagaatgtc

SEQ ID NO: 3885 - RNA, 23 nt, Homo sapiens
  source 1..23: mol_type = genomic RNA
tcaggactaggtgcagaatgtcc

SEQ ID NO: 3886 - RNA, 23 nt, Homo sapiens
  source 1..23: mol_type = genomic RNA
caggactaggtgcagaatgtcct

SEQ ID NO: 3887 - RNA, 23 nt, Homo sapiens
  source 1..23: mol_type = genomic RNA
aggactaggtgcagaatgtcctt

SEQ ID NO: 3888 - RNA, 23 nt, Homo sapiens
  source 1..23: mol_type = genomic RNA
gccacctctccatgggattcata

SEQ ID NO: 3889 - RNA, 23 nt, Homo sapiens
  source 1..23: mol_type = genomic RNA
ccacctctccatgggattcatat

SEQ ID NO: 3890 - RNA, 23 nt, Homo sapiens
  source 1..23: mol_type = genomic RNA
cacctctccatgggattcatatt

SEQ ID NO: 3891 - RNA, 23 nt, Homo sapiens
  source 1..23: mol_type = genomic RNA
acctctccatgggattcatattg

SEQ ID NO: 3892 - RNA, 23 nt, Homo sapiens
  source 1..23: mol_type = genomic RNA
cctctccatgggattcatattgc

SEQ ID NO: 3893 - RNA, 23 nt, Homo sapiens
  source 1..23: mol_type = genomic RNA
ctctccatgggattcatattgca

SEQ ID NO: 3894 - RNA, 23 nt, Homo sapiens
  source 1..23: mol_type = genomic RNA
tctccatgggattcatattgcag

SEQ ID NO: 3895 - RNA, 23 nt, Homo sapiens
  source 1..23: mol_type = genomic RNA
ctccatgggattcatattgcaga

SEQ ID NO: 3896 - RNA, 23 nt, Homo sapiens
  source 1..23: mol_type = genomic RNA
tccatgggattcatattgcagac

SEQ ID NO: 3897 - RNA, 23 nt, Homo sapiens
  source 1..23: mol_type = genomic RNA
ccatgggattcatattgcagaca

SEQ ID NO: 3898 - RNA, 23 nt, Homo sapiens
  source 1..23: mol_type = genomic RNA
catgggattcatattgcagacaa

SEQ ID NO: 3899 - RNA, 23 nt, Homo sapiens
  source 1..23: mol_type = genomic RNA
atgggattcatattgcagacaat

SEQ ID NO: 3900 - RNA, 23 nt, Homo sapiens
  source 1..23: mol_type = genomic RNA
tgggattcatattgcagacaata

SEQ ID NO: 3901 - RNA, 23 nt, Homo sapiens
  source 1..23: mol_type = genomic RNA
gggattcatattgcagacaataa

SEQ ID NO: 3902 - RNA, 23 nt, Homo sapiens
  source 1..23: mol_type = genomic RNA
ggattcatattgcagacaataac

SEQ ID NO: 3903 - RNA, 23 nt, Homo sapiens
  source 1..23: mol_type = genomic RNA
gattcatattgcagacaataacc

SEQ ID NO: 3904 - RNA, 23 nt, Homo sapiens
  source 1..23: mol_type = genomic RNA
attcatattgcagacaataaccc

SEQ ID NO: 3905 - RNA, 23 nt, Homo sapiens
  source 1..23: mol_type = genomic RNA
ccctttaacctgctaagaatacc

SEQ ID NO: 3906 - RNA, 23 nt, Homo sapiens
  source 1..23: mol_type = genomic RNA
cctttaacctgctaagaatacca

SEQ ID NO: 3907 - RNA, 22 nt, Homo sapiens
  source 1..22: mol_type = genomic RNA
ctttaacctgctaagaatacca

SEQ ID NO: 3908 - RNA, 23 nt, Homo sapiens
  source 1..23: mol_type = genomic RNA
tttaacctgctaagaataccagg

SEQ ID NO: 3909 - RNA, 23 nt, Homo sapiens
  source 1..23: mol_type = genomic RNA
ttaacctgctaagaataccagga

SEQ ID NO: 3910 - RNA, 23 nt, Homo sapiens
  source 1..23: mol_type = genomic RNA
taacctgctaagaataccaggat

SEQ ID NO: 3911 - RNA, 23 nt, Homo sapiens
  source 1..23: mol_type = genomic RNA
aacctgctaagaataccaggatc

SEQ ID NO: 3912 - RNA, 23 nt, Homo sapiens
  source 1..23: mol_type = genomic RNA
acctgctaagaataccaggatca

SEQ ID NO: 3913 - RNA, 23 nt, Homo sapiens
  source 1..23: mol_type = genomic RNA
cctgctaagaataccaggatcag

SEQ ID NO: 3914 - RNA, 23 nt, Homo sapiens
  source 1..23: mol_type = genomic RNA
ctgctaagaataccaggatcagt

SEQ ID NO: 3915 - RNA, 23 nt, Homo sapiens
  source 1..23: mol_type = genomic RNA
tgctaagaataccaggatcagta

SEQ ID NO: 3916 - RNA, 23 nt, Homo sapiens
  source 1..23: mol_type = genomic RNA
gctaagaataccaggatcagtat

SEQ ID NO: 3917 - RNA, 23 nt, Homo sapiens
  source 1..23: mol_type = genomic RNA
ctaagaataccaggatcagtatc

SEQ ID NO: 3918 - RNA, 23 nt, Homo sapiens
  source 1..23: mol_type = genomic RNA
taagaataccaggatcagtatcg

SEQ ID NO: 3919 - RNA, 23 nt, Homo sapiens
  source 1..23: mol_type = genomic RNA
aagaataccaggatcagtatcga

SEQ ID NO: 3920 - RNA, 23 nt, Homo sapiens
  source 1..23: mol_type = genomic RNA
agaataccaggatcagtatcgag

SEQ ID NO: 3921 - RNA, 23 nt, Homo sapiens
  source 1..23: mol_type = genomic RNA
gaataccaggatcagtatcgaga

SEQ ID NO: 3922 - RNA, 23 nt, Homo sapiens
  source 1..23: mol_type = genomic RNA
aataccaggatcagtatcgagag

SEQ ID NO: 3923 - RNA, 23 nt, Homo sapiens
  source 1..23: mol_type = genomic RNA
ataccaggatcagtatcgagaga

SEQ ID NO: 3924 - RNA, 23 nt, Homo sapiens
  source 1..23: mol_type = genomic RNA
taccaggatcagtatcgagagag

SEQ ID NO: 3925 - RNA, 23 nt, Homo sapiens
  source 1..23: mol_type = genomic RNA
accaggatcagtatcgagagagg

SEQ ID NO: 3926 - RNA, 23 nt, Homo sapiens
  source 1..23: mol_type = genomic RNA
ccaggatcagtatcgagagaggc

SEQ ID NO: 3927 - RNA, 23 nt, Homo sapiens
  source 1..23: mol_type = genomic RNA
ggcctggcagaagggcgctttcc

SEQ ID NO: 3928 - RNA, 23 nt, Homo sapiens
  source 1..23: mol_type = genomic RNA
gcagaagggcgctttccacccac

SEQ ID NO: 3929 - RNA, 23 nt, Homo sapiens
  source 1..23: mol_type = genomic RNA
cagaagggcgctttccacccact

SEQ ID NO: 3930 - RNA, 23 nt, Homo sapiens
  source 1..23: mol_type = genomic RNA
ccctgtttagtccaccaccgaga

SEQ ID NO: 3931 - RNA, 23 nt, Homo sapiens
  source 1..23: mol_type = genomic RNA
cctgtttagtccaccaccgagac

SEQ ID NO: 3932 - RNA, 23 nt, Homo sapiens
  source 1..23: mol_type = genomic RNA
ctgtttagtccaccaccgagaca

SEQ ID NO: 3933 - RNA, 23 nt, Homo sapiens
  source 1..23: mol_type = genomic RNA
tgtttagtccaccaccgagacat

SEQ ID NO: 3934 - RNA, 23 nt, Homo sapiens
  source 1..23: mol_type = genomic RNA
gtttagtccaccaccgagacatc

SEQ ID NO: 3935 - RNA, 23 nt, Homo sapiens
  source 1..23: mol_type = genomic RNA
tttagtccaccaccgagacatca

SEQ ID NO: 3936 - RNA, 23 nt, Homo sapiens
  source 1..23: mol_type = genomic RNA
ttagtccaccaccgagacatcac

SEQ ID NO: 3937 - RNA, 23 nt, Homo sapiens
  source 1..23: mol_type = genomic RNA
tagtccaccaccgagacatcact

SEQ ID NO: 3938 - RNA, 23 nt, Homo sapiens
  source 1..23: mol_type = genomic RNA
gtccaccaccgagacatcacttg

SEQ ID NO: 3939 - RNA, 23 nt, Homo sapiens
  source 1..23: mol_type = genomic RNA
tccaccaccgagacatcacttgg

SEQ ID NO: 3940 - RNA, 23 nt, Homo sapiens
  source 1..23: mol_type = genomic RNA
ccaccaccgagacatcacttgga

SEQ ID NO: 3941 - RNA, 23 nt, Homo sapiens
  source 1..23: mol_type = genomic RNA
caccaccgagacatcacttggac

SEQ ID NO: 3942 - RNA, 23 nt, Homo sapiens
  source 1..23: mol_type = genomic RNA
ggtgctgcggttgaatccaatgg

SEQ ID NO: 3943 - RNA, 23 nt, Homo sapiens
  source 1..23: mol_type = genomic RNA
ggagcctcccgccatggatttct

SEQ ID NO: 3944 - RNA, 23 nt, Homo sapiens
  source 1..23: mol_type = genomic RNA
gagcctcccgccatggatttctc

SEQ ID NO: 3945 - RNA, 23 nt, Homo sapiens
  source 1..23: mol_type = genomic RNA
gcctcccgccatggatttctcta

SEQ ID NO: 3946 - RNA, 23 nt, Homo sapiens
  source 1..23: mol_type = genomic RNA
cctcccgccatggatttctctag

SEQ ID NO: 3947 - RNA, 23 nt, Homo sapiens
  source 1..23: mol_type = genomic RNA
ctcccgccatggatttctctagg

SEQ ID NO: 3948 - RNA, 23 nt, Homo sapiens
  source 1..23: mol_type = genomic RNA
cccgccatggatttctctaggag

SEQ ID NO: 3949 - RNA, 23 nt, Homo sapiens
  source 1..23: mol_type = genomic RNA
tctaggagacttagagagctggc

SEQ ID NO: 3950 - RNA, 23 nt, Homo sapiens
  source 1..23: mol_type = genomic RNA
ctaggagacttagagagctggca

SEQ ID NO: 3951 - RNA, 23 nt, Homo sapiens
  source 1..23: mol_type = genomic RNA
agggaacacgtctagcccaccgc

SEQ ID NO: 3952 - RNA, 23 nt, Homo sapiens
  source 1..23: mol_type = genomic RNA
gccctatgcaaaggttactgcaa

SEQ ID NO: 3953 - RNA, 23 nt, Homo sapiens
  source 1..23: mol_type = genomic RNA
ccctatgcaaaggttactgcaac

SEQ ID NO: 3954 - RNA, 21 nt, Homo sapiens
  source 1..21: mol_type = genomic RNA
tatgcaaaggttactgcaacc

SEQ ID NO: 3955 - RNA, 23 nt, Homo sapiens
  source 1..23: mol_type = genomic RNA
tatgcaaaggttactgcaaccat

SEQ ID NO: 3956 - RNA, 23 nt, Homo sapiens
  source 1..23: mol_type = genomic RNA
atgcaaaggttactgcaaccatt

SEQ ID NO: 3957 - RNA, 23 nt, Homo sapiens
  source 1..23: mol_type = genomic RNA
tgcaaaggttactgcaaccattc

SEQ ID NO: 3958 - RNA, 23 nt, Homo sapiens
  source 1..23: mol_type = genomic RNA
gcaaaggttactgcaaccattcc

SEQ ID NO: 3959 - RNA, 23 nt, Homo sapiens
  source 1..23: mol_type = genomic RNA
caaaggttactgcaaccattcca

SEQ ID NO: 3960 - RNA, 23 nt, Homo sapiens
  source 1..23: mol_type = genomic RNA
aaaggttactgcaaccattccag

SEQ ID NO: 3961 - RNA, 23 nt, Homo sapiens
  source 1..23: mol_type = genomic RNA
aaggttactgcaaccattccagc

SEQ ID NO: 3962 - RNA, 22 nt, Homo sapiens
  source 1..22: mol_type = genomic RNA
gttactgcaaccattccagcca

SEQ ID NO: 3963 - RNA, 22 nt, Homo sapiens
  source 1..22: mol_type = genomic RNA
cccggtcaagtccaagtcatgc

SEQ ID NO: 3964 - RNA, 23 nt, Homo sapiens
  source 1..23: mol_type = genomic RNA
ccggtcaagtccaagtcatgcga

SEQ ID NO: 3965 - RNA, 23 nt, Homo sapiens
  source 1..23: mol_type = genomic RNA
cggtcaagtccaagtcatgcgag

SEQ ID NO: 3966 - RNA, 23 nt, Homo sapiens
  source 1..23: mol_type = genomic RNA
ggtcaagtccaagtcatgcgagt

SEQ ID NO: 3967 - RNA, 23 nt, Homo sapiens
  source 1..23: mol_type = genomic RNA
gtcaagtccaagtcatgcgagtt

SEQ ID NO: 3968 - RNA, 23 nt, Homo sapiens
  source 1..23: mol_type = genomic RNA
tcaagtccaagtcatgcgagttc

SEQ ID NO: 3969 - RNA, 23 nt, Homo sapiens
  source 1..23: mol_type = genomic RNA
caagtccaagtcatgcgagttct

SEQ ID NO: 3970 - RNA, 23 nt, Homo sapiens
  source 1..23: mol_type = genomic RNA
aagtccaagtcatgcgagttctg

SEQ ID NO: 3971 - RNA, 23 nt, Homo sapiens
  source 1..23: mol_type = genomic RNA
agtccaagtcatgcgagttctgc

SEQ ID NO: 3972 - RNA, 23 nt, Homo sapiens
  source 1..23: mol_type = genomic RNA
gtccaagtcatgcgagttctgcg

SEQ ID NO: 3973 - RNA, 23 nt, Homo sapiens
  source 1..23: mol_type = genomic RNA
tccaagtcatgcgagttctgcgg

SEQ ID NO: 3974 - RNA, 23 nt, Homo sapiens
  source 1..23: mol_type = genomic RNA
caagtcatgcgagttctgcggca

SEQ ID NO: 3975 - RNA, 23 nt, Homo sapiens
  source 1..23: mol_type = genomic RNA
aagtcatgcgagttctgcggcaa

SEQ ID NO: 3976 - RNA, 23 nt, Homo sapiens
  source 1..23: mol_type = genomic RNA
agtcatgcgagttctgcggcaag

SEQ ID NO: 3977 - RNA, 23 nt, Homo sapiens
  source 1..23: mol_type = genomic RNA
atgcgagttctgcggcaagacgt

SEQ ID NO: 3978 - RNA, 23 nt, Homo sapiens
  source 1..23: mol_type = genomic RNA
tgcgagttctgcggcaagacgtt

SEQ ID NO: 3979 - RNA, 23 nt, Homo sapiens
  source 1..23: mol_type = genomic RNA
gcgagttctgcggcaagacgttc

SEQ ID NO: 3980 - RNA, 23 nt, Homo sapiens
  source 1..23: mol_type = genomic RNA
cgagttctgcggcaagacgttca

SEQ ID NO: 3981 - RNA, 23 nt, Homo sapiens
  source 1..23: mol_type = genomic RNA
gagttctgcggcaagacgttcaa

SEQ ID NO: 3982 - RNA, 23 nt, Homo sapiens
  source 1..23: mol_type = genomic RNA
agttctgcggcaagacgttcaaa

SEQ ID NO: 3983 - RNA, 23 nt, Homo sapiens
  source 1..23: mol_type = genomic RNA
gttctgcggcaagacgttcaaat

SEQ ID NO: 3984 - RNA, 23 nt, Homo sapiens
  source 1..23: mol_type = genomic RNA
ttctgcggcaagacgttcaaatt

SEQ ID NO: 3985 - RNA, 23 nt, Homo sapiens
  source 1..23: mol_type = genomic RNA
tctgcggcaagacgttcaaattt

SEQ ID NO: 3986 - RNA, 23 nt, Homo sapiens
  source 1..23: mol_type = genomic RNA
ctgcggcaagacgttcaaatttc

SEQ ID NO: 3987 - RNA, 23 nt, Homo sapiens
  source 1..23: mol_type = genomic RNA
cccatgacggtcaagtccgacga

SEQ ID NO: 3988 - RNA, 23 nt, Homo sapiens
  source 1..23: mol_type = genomic RNA
ctcaagtccgtggtggccaagtt

SEQ ID NO: 3989 - RNA, 23 nt, Homo sapiens
  source 1..23: mol_type = genomic RNA
tcaagtccgtggtggccaagttc

SEQ ID NO: 3990 - RNA, 23 nt, Homo sapiens
  source 1..23: mol_type = genomic RNA
agtccgtggtggccaagttcaag

SEQ ID NO: 3991 - RNA, 23 nt, Homo sapiens
  source 1..23: mol_type = genomic RNA
gaagaggaggacgacgaggaaga

SEQ ID NO: 3992 - RNA, 23 nt, Homo sapiens
  source 1..23: mol_type = genomic RNA
aagaggaggacgacgaggaagag

SEQ ID NO: 3993 - RNA, 23 nt, Homo sapiens
  source 1..23: mol_type = genomic RNA
gaggagctgacggagagcgagag

SEQ ID NO: 3994 - RNA, 23 nt, Homo sapiens
  source 1..23: mol_type = genomic RNA
ggagctgacggagagcgagaggg

SEQ ID NO: 3995 - RNA, 23 nt, Homo sapiens
  source 1..23: mol_type = genomic RNA
gagctgacggagagcgagagggt

SEQ ID NO: 3996 - RNA, 23 nt, Homo sapiens
  source 1..23: mol_type = genomic RNA
agctgacggagagcgagagggtg

SEQ ID NO: 3997 - RNA, 23 nt, Homo sapiens
  source 1..23: mol_type = genomic RNA
tccatgcagcacttcagcgaggc

SEQ ID NO: 3998 - RNA, 23 nt, Homo sapiens
  source 1..23: mol_type = genomic RNA
catgcagcacttcagcgaggcct

SEQ ID NO: 3999 - RNA, 23 nt, Homo sapiens
  source 1..23: mol_type = genomic RNA
cttcagcgaggccttccaccagg

SEQ ID NO: 4000 - RNA, 22 nt, Homo sapiens
  source 1..22: mol_type = genomic RNA
ggaccgcatagacgatggcact

SEQ ID NO: 4001 - RNA, 23 nt, Homo sapiens
  source 1..23: mol_type = genomic RNA
accgcatagacgatggcactgtt

SEQ ID NO: 4002 - RNA, 23 nt, Homo sapiens
  source 1..23: mol_type = genomic RNA
cgcatagacgatggcactgttaa

SEQ ID NO: 4003 - RNA, 23 nt, Homo sapiens
  source 1..23: mol_type = genomic RNA
ccaggcagctcaaagatcccttc

SEQ ID NO: 4004 - RNA, 23 nt, Homo sapiens
  source 1..23: mol_type = genomic RNA
caggcagctcaaagatcccttcc

SEQ ID NO: 4005 - RNA, 23 nt, Homo sapiens
  source 1..23: mol_type = genomic RNA
cttcggagactccagacaatcgc

SEQ ID NO: 4006 - RNA, 23 nt, Homo sapiens
  source 1..23: mol_type = genomic RNA
ttcggagactccagacaatcgcc

SEQ ID NO: 4007 - RNA, 23 nt, Homo sapiens
  source 1..23: mol_type = genomic RNA
tcggagactccagacaatcgcct

SEQ ID NO: 4008 - RNA, 23 nt, Homo sapiens
  source 1..23: mol_type = genomic RNA
cggagactccagacaatcgcctt

SEQ ID NO: 4009 - RNA, 23 nt, Homo sapiens
  source 1..23: mol_type = genomic RNA
ggagactccagacaatcgccttt

SEQ ID NO: 4010 - RNA, 23 nt, Homo sapiens
  source 1..23: mol_type = genomic RNA
gagactccagacaatcgcctttt

SEQ ID NO: 4011 - RNA, 23 nt, Homo sapiens
  source 1..23: mol_type = genomic RNA
agactccagacaatcgccttttg

SEQ ID NO: 4012 - RNA, 23 nt, Homo sapiens
  source 1..23: mol_type = genomic RNA
gactccagacaatcgccttttgc

SEQ ID NO: 4013 - RNA, 23 nt, Homo sapiens
  source 1..23: mol_type = genomic RNA
ctccagacaatcgccttttgcct

SEQ ID NO: 4014 - RNA, 23 nt, Homo sapiens
  source 1..23: mol_type = genomic RNA
tccagacaatcgccttttgcctc

SEQ ID NO: 4015 - RNA, 23 nt, Homo sapiens
  source 1..23: mol_type = genomic RNA
cagacgcagcgacacttgtgagt

SEQ ID NO: 4016 - RNA, 23 nt, Homo sapiens
  source 1..23: mol_type = genomic RNA
gacgcagcgacacttgtgagtac

SEQ ID NO: 4017 - RNA, 23 nt, Homo sapiens
  source 1..23: mol_type = genomic RNA
acgcagcgacacttgtgagtact

SEQ ID NO: 4018 - RNA, 23 nt, Homo sapiens
  source 1..23: mol_type = genomic RNA
cgcagcgacacttgtgagtactg

SEQ ID NO: 4019 - RNA, 23 nt, Homo sapiens
  source 1..23: mol_type = genomic RNA
gcgacacttgtgagtactgtggg

SEQ ID NO: 4020 - RNA, 23 nt, Homo sapiens
  source 1..23: mol_type = genomic RNA
cgacacttgtgagtactgtggga

SEQ ID NO: 4021 - RNA, 23 nt, Homo sapiens
  source 1..23: mol_type = genomic RNA
gacacttgtgagtactgtgggaa

SEQ ID NO: 4022 - RNA, 22 nt, Homo sapiens
  source 1..22: mol_type = genomic RNA
acacttgtgagtactgtgggaa

SEQ ID NO: 4023 - RNA, 23 nt, Homo sapiens
  source 1..23: mol_type = genomic RNA
cacttgtgagtactgtgggaaag

SEQ ID NO: 4024 - RNA, 23 nt, Homo sapiens
  source 1..23: mol_type = genomic RNA
acttgtgagtactgtgggaaagt

SEQ ID NO: 4025 - RNA, 23 nt, Homo sapiens
  source 1..23: mol_type = genomic RNA
cttgtgagtactgtgggaaagtc

SEQ ID NO: 4026 - RNA, 23 nt, Homo sapiens
  source 1..23: mol_type = genomic RNA
ttgtgagtactgtgggaaagtct

SEQ ID NO: 4027 - RNA, 23 nt, Homo sapiens
  source 1..23: mol_type = genomic RNA
aagtcttcaagaactgtagcaat

SEQ ID NO: 4028 - RNA, 23 nt, Homo sapiens
  source 1..23: mol_type = genomic RNA
agtcttcaagaactgtagcaatc

SEQ ID NO: 4029 - RNA, 23 nt, Homo sapiens
  source 1..23: mol_type = genomic RNA
gtcttcaagaactgtagcaatct

SEQ ID NO: 4030 - RNA, 23 nt, Homo sapiens
  source 1..23: mol_type = genomic RNA
tcttcaagaactgtagcaatctc

SEQ ID NO: 4031 - RNA, 23 nt, Homo sapiens
  source 1..23: mol_type = genomic RNA
cttcaagaactgtagcaatctca

SEQ ID NO: 4032 - RNA, 23 nt, Homo sapiens
  source 1..23: mol_type = genomic RNA
ttcaagaactgtagcaatctcac

SEQ ID NO: 4033 - RNA, 23 nt, Homo sapiens
  source 1..23: mol_type = genomic RNA
tcaagaactgtagcaatctcact

SEQ ID NO: 4034 - RNA, 23 nt, Homo sapiens
  source 1..23: mol_type = genomic RNA
aggagaagccacacgggcgaaag

SEQ ID NO: 4035 - RNA, 23 nt, Homo sapiens
  source 1..23: mol_type = genomic RNA
gaagccacacgggcgaaaggcct

SEQ ID NO: 4036 - RNA, 23 nt, Homo sapiens
  source 1..23: mol_type = genomic RNA
aagccacacgggcgaaaggcctt

SEQ ID NO: 4037 - RNA, 23 nt, Homo sapiens
  source 1..23: mol_type = genomic RNA
ccacacgggcgaaaggccttata

SEQ ID NO: 4038 - RNA, 23 nt, Homo sapiens
  source 1..23: mol_type = genomic RNA
cacacgggcgaaaggccttataa

SEQ ID NO: 4039 - RNA, 23 nt, Homo sapiens
  source 1..23: mol_type = genomic RNA
acacgggcgaaaggccttataaa

SEQ ID NO: 4040 - RNA, 23 nt, Homo sapiens
  source 1..23: mol_type = genomic RNA
cacgggcgaaaggccttataaat

SEQ ID NO: 4041 - RNA, 23 nt, Homo sapiens
  source 1..23: mol_type = genomic RNA
acgggcgaaaggccttataaatg

SEQ ID NO: 4042 - RNA, 23 nt, Homo sapiens
  source 1..23: mol_type = genomic RNA
cgggcgaaaggccttataaatgc

SEQ ID NO: 4043 - RNA, 23 nt, Homo sapiens
  source 1..23: mol_type = genomic RNA
gggcgaaaggccttataaatgcg

SEQ ID NO: 4044 - RNA, 23 nt, Homo sapiens
  source 1..23: mol_type = genomic RNA
gcgaaaggccttataaatgcgag

SEQ ID NO: 4045 - RNA, 23 nt, Homo sapiens
  source 1..23: mol_type = genomic RNA
cgaaaggccttataaatgcgagg

SEQ ID NO: 4046 - RNA, 23 nt, Homo sapiens
  source 1..23: mol_type = genomic RNA
gaaaggccttataaatgcgagct

SEQ ID NO: 4047 - RNA, 23 nt, Homo sapiens
  source 1..23: mol_type = genomic RNA
aaaggccttataaatgcgagctg

SEQ ID NO: 4048 - RNA, 22 nt, Homo sapiens
  source 1..22: mol_type = genomic RNA
aaggccttataaatgcgagctg

SEQ ID NO: 4049 - RNA, 23 nt, Homo sapiens
  source 1..23: mol_type = genomic RNA
aggccttataaatgcgagctgtg

SEQ ID NO: 4050 - RNA, 23 nt, Homo sapiens
  source 1..23: mol_type = genomic RNA
ggggacattcttatttttatcga

SEQ ID NO: 4051 - RNA, 23 nt, Homo sapiens
  source 1..23: mol_type = genomic RNA
gggacattcttatttttatcgag

SEQ ID NO: 4052 - RNA, 23 nt, Homo sapiens
  source 1..23: mol_type = genomic RNA
gacattcttatttttatcgagca

SEQ ID NO: 4053 - RNA, 23 nt, Homo sapiens
  source 1..23: mol_type = genomic RNA
cattcttatttttatcgagcaca

SEQ ID NO: 4054 - RNA, 23 nt, Homo sapiens
  source 1..23: mol_type = genomic RNA
attcttatttttatcgagcacaa

SEQ ID NO: 4055 - RNA, 23 nt, Homo sapiens
  source 1..23: mol_type = genomic RNA
ttcttatttttatcgagcacaaa

SEQ ID NO: 4056 - RNA, 23 nt, Homo sapiens
  source 1..23: mol_type = genomic RNA
tcttatttttatcgagcacaaac

SEQ ID NO: 4057 - RNA, 23 nt, Homo sapiens
  source 1..23: mol_type = genomic RNA
cttatttttatcgagcacaaacg

SEQ ID NO: 4058 - RNA, 23 nt, Homo sapiens
  source 1..23: mol_type = genomic RNA
ttatttttatcgagcacaaacgg

SEQ ID NO: 4059 - RNA, 23 nt, Homo sapiens
  source 1..23: mol_type = genomic RNA
tatttttatcgagcacaaacgga

SEQ ID NO: 4060 - RNA, 23 nt, Homo sapiens
  source 1..23: mol_type = genomic RNA
atttttatcgagcacaaacggaa

SEQ ID NO: 4061 - RNA, 23 nt, Homo sapiens
  source 1..23: mol_type = genomic RNA
tttttatcgagcacaaacggaaa

SEQ ID NO: 4062 - RNA, 23 nt, Homo sapiens
  source 1..23: mol_type = genomic RNA
ttttatcgagcacaaacggaaac

SEQ ID NO: 4063 - RNA, 23 nt, Homo sapiens
  source 1..23: mol_type = genomic RNA
aatatgccccgcagggtatttgt

SEQ ID NO: 4064 - RNA, 23 nt, Homo sapiens
  source 1..23: mol_type = genomic RNA
cccgcagggtatttgtaaagatg

SEQ ID NO: 4065 - RNA, 23 nt, Homo sapiens
  source 1..23: mol_type = genomic RNA
ccgcagggtatttgtaaagatga

SEQ ID NO: 4066 - RNA, 23 nt, Homo sapiens
  source 1..23: mol_type = genomic RNA
cgcagggtatttgtaaagatgag

SEQ ID NO: 4067 - RNA, 23 nt, Homo sapiens
  source 1..23: mol_type = genomic RNA
gcagggtatttgtaaagatgagc

SEQ ID NO: 4068 - RNA, 23 nt, Homo sapiens
  source 1..23: mol_type = genomic RNA
agggtatttgtaaagatgagccc

SEQ ID NO: 4069 - RNA, 23 nt, Homo sapiens
  source 1..23: mol_type = genomic RNA
gggtatttgtaaagatgagccca

SEQ ID NO: 4070 - RNA, 23 nt, Homo sapiens
  source 1..23: mol_type = genomic RNA
ggtatttgtaaagatgagcccag

SEQ ID NO: 4071 - RNA, 23 nt, Homo sapiens
  source 1..23: mol_type = genomic RNA
gtatttgtaaagatgagcccagc

SEQ ID NO: 4072 - RNA, 23 nt, Homo sapiens
  source 1..23: mol_type = genomic RNA
tatttgtaaagatgagcccagca

SEQ ID NO: 4073 - RNA, 23 nt, Homo sapiens
  source 1..23: mol_type = genomic RNA
atttgtaaagatgagcccagcag

SEQ ID NO: 4074 - RNA, 23 nt, Homo sapiens
  source 1..23: mol_type = genomic RNA
tttgtaaagatgagcccagcagc

SEQ ID NO: 4075 - RNA, 23 nt, Homo sapiens
  source 1..23: mol_type = genomic RNA
ttgtaaagatgagcccagcagct

SEQ ID NO: 4076 - RNA, 23 nt, Homo sapiens
  source 1..23: mol_type = genomic RNA
tgtaaagatgagcccagcagcta

SEQ ID NO: 4077 - RNA, 23 nt, Homo sapiens
  source 1..23: mol_type = genomic RNA
taaagatgagcccagcagctaca

SEQ ID NO: 4078 - RNA, 23 nt, Homo sapiens
  source 1..23: mol_type = genomic RNA
aaagatgagcccagcagctacac

SEQ ID NO: 4079 - RNA, 23 nt, Homo sapiens
  source 1..23: mol_type = genomic RNA
aagatgagcccagcagctacaca

SEQ ID NO: 4080 - RNA, 23 nt, Homo sapiens
  source 1..23: mol_type = genomic RNA
agatgagcccagcagctacacat

SEQ ID NO: 4081 - RNA, 23 nt, Homo sapiens
  source 1..23: mol_type = genomic RNA
gatgagcccagcagctacacatg

SEQ ID NO: 4082 - RNA, 23 nt, Homo sapiens
  source 1..23: mol_type = genomic RNA
ctacacatgtacaacttgcaaac

SEQ ID NO: 4083 - RNA, 23 nt, Homo sapiens
  source 1..23: mol_type = genomic RNA
acacatgtacaacttgcaaacag

SEQ ID NO: 4084 - RNA, 23 nt, Homo sapiens
  source 1..23: mol_type = genomic RNA
cttgcaacacgcacagaacactc

SEQ ID NO: 4085 - RNA, 23 nt, Homo sapiens
  source 1..23: mol_type = genomic RNA
gtgtacagtaccctggagaaaca

SEQ ID NO: 4086 - RNA, 23 nt, Homo sapiens
  source 1..23: mol_type = genomic RNA
tgtacagtaccctggagaaacac

SEQ ID NO: 4087 - RNA, 23 nt, Homo sapiens
  source 1..23: mol_type = genomic RNA
gtacagtaccctggagaaacaca

SEQ ID NO: 4088 - RNA, 23 nt, Homo sapiens
  source 1..23: mol_type = genomic RNA
tacagtaccctggagaaacacat

SEQ ID NO: 4089 - RNA, 23 nt, Homo sapiens
  source 1..23: mol_type = genomic RNA
acagtaccctggagaaacacatg

SEQ ID NO: 4090 - RNA, 23 nt, Homo sapiens
  source 1..23: mol_type = genomic RNA
cagtaccctggagaaacacatga

SEQ ID NO: 4091 - RNA, 23 nt, Homo sapiens
  source 1..23: mol_type = genomic RNA
agtaccctggagaaacacatgaa

SEQ ID NO: 4092 - RNA, 23 nt, Homo sapiens
  source 1..23: mol_type = genomic RNA
gtaccctggagaaacacatgaaa

SEQ ID NO: 4093 - RNA, 23 nt, Homo sapiens
  source 1..23: mol_type = genomic RNA
taccctggagaaacacatgaaaa

SEQ ID NO: 4094 - RNA, 23 nt, Homo sapiens
  source 1..23: mol_type = genomic RNA
accctggagaaacacatgaaaaa

SEQ ID NO: 4095 - RNA, 23 nt, Homo sapiens
  source 1..23: mol_type = genomic RNA
ccctggagaaacacatgaaaaaa

SEQ ID NO: 4096 - RNA, 23 nt, Homo sapiens
  source 1..23: mol_type = genomic RNA
cctggagaaacacatgaaaaaat

SEQ ID NO: 4097 - RNA, 23 nt, Homo sapiens
  source 1..23: mol_type = genomic RNA
ctggagaaacacatgaaaaaatg

SEQ ID NO: 4098 - RNA, 23 nt, Homo sapiens
  source 1..23: mol_type = genomic RNA
tgaaccagaccacggcccgttgg

SEQ ID NO: 4099 - RNA, 23 nt, Homo sapiens
  source 1..23: mol_type = genomic RNA
gaaccagaccacggcccgttggg

SEQ ID NO: 4100 - RNA, 23 nt, Homo sapiens
  source 1..23: mol_type = genomic RNA
gggacattcttatttttatcgag

SEQ ID NO: 4101 - RNA, 23 nt, Homo sapiens
  source 1..23: mol_type = genomic RNA
gacattcttatttttatcgagca

SEQ ID NO: 4102 - RNA, 22 nt, Homo sapiens
  source 1..22: mol_type = genomic RNA
tcttatttttatcgagcacaaa

SEQ ID NO: 4103 - RNA, 23 nt, Homo sapiens
  source 1..23: mol_type = genomic RNA
cttatttttatcgagcacaaacg

SEQ ID NO: 4104 - RNA, 23 nt, Homo sapiens
  source 1..23: mol_type = genomic RNA
ttatttttatcgagcacaaacgg

SEQ ID NO: 4105 - RNA, 23 nt, Homo sapiens
  source 1..23: mol_type = genomic RNA
ttttatcgagcacaaacggaaac

SEQ ID NO: 4106 - RNA, 22 nt, Homo sapiens
  source 1..22: mol_type = genomic RNA
caccttccccttcaccaatcga

SEQ ID NO: 4107 - RNA, 23 nt, Homo sapiens
  source 1..23: mol_type = genomic RNA
cccttcaccaatcgagatgaaaa

SEQ ID NO: 4108 - RNA, 23 nt, Homo sapiens
  source 1..23: mol_type = genomic RNA
aaaaagcatccaatcccgtggag

SEQ ID NO: 4109 - RNA, 23 nt, Homo sapiens
  source 1..23: mol_type = genomic RNA
aagcatccaatcccgtggaggtt

SEQ ID NO: 4110 - RNA, 23 nt, Homo sapiens
  source 1..23: mol_type = genomic RNA
ggtcacgccagaggatgacgatt

SEQ ID NO: 4111 - RNA, 23 nt, Homo sapiens
  source 1..23: mol_type = genomic RNA
ggatgacgattgtttatcaacgt

SEQ ID NO: 4112 - RNA, 23 nt, Homo sapiens
  source 1..23: mol_type = genomic RNA
gatgacgattgtttatcaacgtc

SEQ ID NO: 4113 - RNA, 23 nt, Homo sapiens
  source 1..23: mol_type = genomic RNA
gattgtttatcaacgtcatctag

SEQ ID NO: 4114 - RNA, 23 nt, Homo sapiens
  source 1..23: mol_type = genomic RNA
aatatgccccgcagggtatttgt

SEQ ID NO: 4115 - RNA, 23 nt, Homo sapiens
  source 1..23: mol_type = genomic RNA
cccgcagggtatttgtaaagatg

SEQ ID NO: 4116 - RNA, 23 nt, Homo sapiens
  source 1..23: mol_type = genomic RNA
cgcagggtatttgtaaagatgag

SEQ ID NO: 4117 - RNA, 23 nt, Homo sapiens
  source 1..23: mol_type = genomic RNA
gcagggtatttgtaaagatgagc

SEQ ID NO: 4118 - RNA, 23 nt, Homo sapiens
  source 1..23: mol_type = genomic RNA
agggtatttgtaaagatgagccc

SEQ ID NO: 4119 - RNA, 23 nt, Homo sapiens
  source 1..23: mol_type = genomic RNA
ggtatttgtaaagatgagcccag

SEQ ID NO: 4120 - RNA, 23 nt, Homo sapiens
  source 1..23: mol_type = genomic RNA
gtatttgtaaagatgagcccagc

SEQ ID NO: 4121 - RNA, 23 nt, Homo sapiens
  source 1..23: mol_type = genomic RNA
atttgtaaagatgagcccagcag

SEQ ID NO: 4122 - RNA, 23 nt, Homo sapiens
  source 1..23: mol_type = genomic RNA
tttgtaaagatgagcccagcagc

SEQ ID NO: 4123 - RNA, 23 nt, Homo sapiens
  source 1..23: mol_type = genomic RNA
ttgtaaagatgagcccagcagct

SEQ ID NO: 4124 - RNA, 23 nt, Homo sapiens
  source 1..23: mol_type = genomic RNA
aaagatgagcccagcagctacac

SEQ ID NO: 4125 - RNA, 23 nt, Homo sapiens
  source 1..23: mol_type = genomic RNA
agatgagcccagcagctacacat

SEQ ID NO: 4126 - RNA, 23 nt, Homo sapiens
  source 1..23: mol_type = genomic RNA
gatgagcccagcagctacacatg

SEQ ID NO: 4127 - RNA, 23 nt, Homo sapiens
  source 1..23: mol_type = genomic RNA
ctacacatgtacaacttgcaaac

SEQ ID NO: 4128 - RNA, 23 nt, Homo sapiens
  source 1..23: mol_type = genomic RNA
acacatgtacaacttgcaaacag

SEQ ID NO: 4129 - RNA, 23 nt, Homo sapiens
  source 1..23: mol_type = genomic RNA
cttgcaacacgcacagaacactc

SEQ ID NO: 4130 - RNA, 23 nt, Homo sapiens
  source 1..23: mol_type = genomic RNA
tgcaacacgcacagaacactcat

SEQ ID NO: 4131 - RNA, 23 nt, Homo sapiens
  source 1..23: mol_type = genomic RNA
caacacgcacagaacactcatgg

SEQ ID NO: 4132 - RNA, 23 nt, Homo sapiens
  source 1..23: mol_type = genomic RNA
tcccctgaccccgcgggttggta

SEQ ID NO: 4133 - RNA, 23 nt, Homo sapiens
  source 1..23: mol_type = genomic RNA
ccctgaccccgcgggttggtatc

SEQ ID NO: 4134 - RNA, 23 nt, Homo sapiens
  source 1..23: mol_type = genomic RNA
ctgaccccgcgggttggtatccc

SEQ ID NO: 4135 - RNA, 23 nt, Homo sapiens
  source 1..23: mol_type = genomic RNA
tgaccccgcgggttggtatccct

SEQ ID NO: 4136 - RNA, 23 nt, Homo sapiens
  source 1..23: mol_type = genomic RNA
tggtatcccttcaggactaggtg

SEQ ID NO: 4137 - RNA, 23 nt, Homo sapiens
  source 1..23: mol_type = genomic RNA
tgcagacaataacccctttaacc

SEQ ID NO: 4138 - RNA, 23 nt, Homo sapiens
  source 1..23: mol_type = genomic RNA
gcagacaataacccctttaacct

SEQ ID NO: 4139 - RNA, 23 nt, Homo sapiens
  source 1..23: mol_type = genomic RNA
agaataccaggatcagtatcgag

SEQ ID NO: 4140 - RNA, 23 nt, Homo sapiens
  source 1..23: mol_type = genomic RNA
cccctgtttagtccaccaccgag

SEQ ID NO: 4141 - RNA, 23 nt, Homo sapiens
  source 1..23: mol_type = genomic RNA
gtcaagtccaagtcatgcgagtt

SEQ ID NO: 4142 - RNA, 23 nt, Homo sapiens
  source 1..23: mol_type = genomic RNA
tcaagtccaagtcatgcgagttc

SEQ ID NO: 4143 - RNA, 23 nt, Homo sapiens
  source 1..23: mol_type = genomic RNA
ctgtgcgaccacgcgtgcaccca

SEQ ID NO: 4144 - RNA, 23 nt, Homo sapiens
  source 1..23: mol_type = genomic RNA
ccccatgacggtcaagtccgacg

SEQ ID NO: 4145 - RNA, 23 nt, Homo sapiens
  source 1..23: mol_type = genomic RNA
ccatgacggtcaagtccgacgac

SEQ ID NO: 4146 - RNA, 23 nt, Homo sapiens
  source 1..23: mol_type = genomic RNA
catgacggtcaagtccgacgacg

SEQ ID NO: 4147 - RNA, 23 nt, Homo sapiens
  source 1..23: mol_type = genomic RNA
atgacggtcaagtccgacgacgg

SEQ ID NO: 4148 - RNA, 23 nt, Homo sapiens
  source 1..23: mol_type = genomic RNA
tgacggtcaagtccgacgacggt

SEQ ID NO: 4149 - RNA, 23 nt, Homo sapiens
  source 1..23: mol_type = genomic RNA
gacggtcaagtccgacgacggtc

SEQ ID NO: 4150 - RNA, 23 nt, Homo sapiens
  source 1..23: mol_type = genomic RNA
acggtcaagtccgacgacggtct

SEQ ID NO: 4151 - RNA, 23 nt, Homo sapiens
  source 1..23: mol_type = genomic RNA
gtcaagtccgacgacggtctctc

SEQ ID NO: 4152 - RNA, 23 nt, Homo sapiens
  source 1..23: mol_type = genomic RNA
ccagcagcgcgctcaagtccgtg

SEQ ID NO: 4153 - RNA, 23 nt, Homo sapiens
  source 1..23: mol_type = genomic RNA
cagcagcgcgctcaagtccgtgg

SEQ ID NO: 4154 - RNA, 23 nt, Homo sapiens
  source 1..23: mol_type = genomic RNA
gcgagaacgaccccaacctgatc

SEQ ID NO: 4155 - RNA, 23 nt, Homo sapiens
  source 1..23: mol_type = genomic RNA
agctgacggagagcgagagggtg

SEQ ID NO: 4156 - RNA, 23 nt, Homo sapiens
  source 1..23: mol_type = genomic RNA
ggagagcgagagggtggactacg

SEQ ID NO: 4157 - RNA, 23 nt, Homo sapiens
  source 1..23: mol_type = genomic RNA
gagcgagagggtggactacggct

SEQ ID NO: 4158 - RNA, 23 nt, Homo sapiens
  source 1..23: mol_type = genomic RNA
agcgagagggtggactacggctt

SEQ ID NO: 4159 - RNA, 23 nt, Homo sapiens
  source 1..23: mol_type = genomic RNA
gagagggtggactacggcttcgg

SEQ ID NO: 4160 - RNA, 23 nt, Homo sapiens
  source 1..23: mol_type = genomic RNA
accacgagaacagctcgcggggc

SEQ ID NO: 4161 - RNA, 23 nt, Homo sapiens
  source 1..23: mol_type = genomic RNA
ctgggcgagaagcataagcgcgg

SEQ ID NO: 4162 - RNA, 23 nt, Homo sapiens
  source 1..23: mol_type = genomic RNA
gcgagaagcataagcgcggccac

SEQ ID NO: 4163 - RNA, 23 nt, Homo sapiens
  source 1..23: mol_type = genomic RNA
cttgcgacgaagactcggtggcc

SEQ ID NO: 4164 - RNA, 23 nt, Homo sapiens
  source 1..23: mol_type = genomic RNA
aagactcggtggccggcgagtcg

SEQ ID NO: 4165 - RNA, 23 nt, Homo sapiens
  source 1..23: mol_type = genomic RNA
tggccggcgagtcggaccgcata

SEQ ID NO: 4166 - RNA, 23 nt, Homo sapiens
  source 1..23: mol_type = genomic RNA
gccggcgagtcggaccgcataga

SEQ ID NO: 4167 - RNA, 23 nt, Homo sapiens
  source 1..23: mol_type = genomic RNA
ccggcgagtcggaccgcatagac

SEQ ID NO: 4168 - RNA, 23 nt, Homo sapiens
  source 1..23: mol_type = genomic RNA
gcgagtcggaccgcatagacgat

SEQ ID NO: 4169 - RNA, 23 nt, Homo sapiens
  source 1..23: mol_type = genomic RNA
cgagtcggaccgcatagacgatg

SEQ ID NO: 4170 - RNA, 23 nt, Homo sapiens
  source 1..23: mol_type = genomic RNA
gagtcggaccgcatagacgatgg

SEQ ID NO: 4171 - RNA, 23 nt, Homo sapiens
  source 1..23: mol_type = genomic RNA
cggagactccagacaatcgcctt

SEQ ID NO: 4172 - RNA, 23 nt, Homo sapiens
  source 1..23: mol_type = genomic RNA
tcgccttttgcctcctcgtcgga

SEQ ID NO: 4173 - RNA, 23 nt, Homo sapiens
  source 1..23: mol_type = genomic RNA
tcctcgtcggagcactcctcgga

SEQ ID NO: 4174 - RNA, 23 nt, Homo sapiens
  source 1..23: mol_type = genomic RNA
ctcgtcggagcactcctcggaga

SEQ ID NO: 4175 - RNA, 23 nt, Homo sapiens
  source 1..23: mol_type = genomic RNA
cggagcactcctcggagaacggg

SEQ ID NO: 4176 - RNA, 23 nt, Homo sapiens
  source 1..23: mol_type = genomic RNA
gggagcacgccccatattagtgg

SEQ ID NO: 4177 - RNA, 23 nt, Homo sapiens
  source 1..23: mol_type = genomic RNA
ggagcacgccccatattagtggt

SEQ ID NO: 4178 - RNA, 23 nt, Homo sapiens
  source 1..23: mol_type = genomic RNA
agcacgccccatattagtggtcc

SEQ ID NO: 4179 - RNA, 23 nt, Homo sapiens
  source 1..23: mol_type = genomic RNA
gccccatattagtggtccgggcc

SEQ ID NO: 4180 - RNA, 23 nt, Homo sapiens
  source 1..23: mol_type = genomic RNA
catattagtggtccgggcccggg

SEQ ID NO: 4181 - RNA, 23 nt, Homo sapiens
  source 1..23: mol_type = genomic RNA
aatttgtaagatgccttttagcg

SEQ ID NO: 4182 - RNA, 23 nt, Homo sapiens
  source 1..23: mol_type = genomic RNA
atttgtaagatgccttttagcgt

SEQ ID NO: 4183 - RNA, 23 nt, Homo sapiens
  source 1..23: mol_type = genomic RNA
tttgtaagatgccttttagcgtg

SEQ ID NO: 4184 - RNA, 23 nt, Homo sapiens
  source 1..23: mol_type = genomic RNA
gtaagatgccttttagcgtgtac

SEQ ID NO: 4185 - RNA, 23 nt, Homo sapiens
  source 1..23: mol_type = genomic RNA
gccttttagcgtgtacagtaccc

SEQ ID NO: 4186 - RNA, 23 nt, Homo sapiens
  source 1..23: mol_type = genomic RNA
ccttttagcgtgtacagtaccct

SEQ ID NO: 4187 - RNA, 23 nt, Homo sapiens
  source 1..23: mol_type = genomic RNA
tgtacagtaccctggagaaacac

SEQ ID NO: 4188 - RNA, 23 nt, Homo sapiens
  source 1..23: mol_type = genomic RNA
tacagtaccctggagaaacacat

SEQ ID NO: 4189 - RNA, 23 nt, Homo sapiens
  source 1..23: mol_type = genomic RNA
acagtaccctggagaaacacatg

SEQ ID NO: 4190 - RNA, 23 nt, Homo sapiens
  source 1..23: mol_type = genomic RNA
cctggagaaacacatgaaaaaat

SEQ ID NO: 4191 - RNA, 23 nt, Homo sapiens
  source 1..23: mol_type = genomic RNA
ctggagaaacacatgaaaaaatg

SEQ ID NO: 4192 - RNA, 23 nt, Homo sapiens
  source 1..23: mol_type = genomic RNA
aaatggcacagtgatcgagtgtt

SEQ ID NO: 4193 - RNA, 23 nt, Homo sapiens
  source 1..23: mol_type = genomic RNA
aaaacagtctttggattaaccct

SEQ ID NO: 4194 - RNA, 23 nt, Homo sapiens
  source 1..23: mol_type = genomic RNA
ttggattaaccctctatagacag

SEQ ID NO: 4195 - RNA, 23 nt, Homo sapiens
  source 1..23: mol_type = genomic RNA
ctatagacagaatagatagcact

SEQ ID NO: 4196 - RNA, 23 nt, Homo sapiens
  source 1..23: mol_type = genomic RNA
ggtaataaaccttaggaactagc

SEQ ID NO: 4197 - RNA, 23 nt, Homo sapiens
  source 1..23: mol_type = genomic RNA
agatgacccattatgtcctagtt

SEQ ID NO: 4198 - RNA, 23 nt, Homo sapiens
  source 1..23: mol_type = genomic RNA
attataccagtataaaagctact

SEQ ID NO: 4199 - RNA, 23 nt, Homo sapiens
  source 1..23: mol_type = genomic RNA
caaaagccctggaacgcaattaa

SEQ ID NO: 4200 - RNA, 23 nt, Homo sapiens
  source 1..23: mol_type = genomic RNA
gcaattaaatacactagtaagga

SEQ ID NO: 4201 - RNA, 23 nt, Homo sapiens
  source 1..23: mol_type = genomic RNA
caattaaatacactagtaaggag

SEQ ID NO: 4202 - RNA, 23 nt, Homo sapiens
  source 1..23: mol_type = genomic RNA
aatatgatttattagcacaacgt

SEQ ID NO: 4203 - RNA, 23 nt, Homo sapiens
  source 1..23: mol_type = genomic RNA
atatgatttattagcacaacgtg

SEQ ID NO: 4204 - RNA, 23 nt, Homo sapiens
  source 1..23: mol_type = genomic RNA
atgatttattagcacaacgtggt

SEQ ID NO: 4205 - RNA, 23 nt, Homo sapiens
  source 1..23: mol_type = genomic RNA
tgatttattagcacaacgtggta

SEQ ID NO: 4206 - RNA, 23 nt, Homo sapiens
  source 1..23: mol_type = genomic RNA
atttattagcacaacgtggtact

SEQ ID NO: 4207 - RNA, 23 nt, Homo sapiens
  source 1..23: mol_type = genomic RNA
attagcacaacgtggtactattt

SEQ ID NO: 4208 - RNA, 23 nt, Homo sapiens
  source 1..23: mol_type = genomic RNA
tcttttttattaagctagcatct

SEQ ID NO: 4209 - RNA, 23 nt, Homo sapiens
  source 1..23: mol_type = genomic RNA
tttttattaagctagcatctgcc

SEQ ID NO: 4210 - RNA, 23 nt, Homo sapiens
  source 1..23: mol_type = genomic RNA
tcttttctctaatcagagataca

SEQ ID NO: 4211 - RNA, 23 nt, Homo sapiens
  source 1..23: mol_type = genomic RNA
gagatacagaggttgagtataaa

SEQ ID NO: 4212 - RNA, 23 nt, Homo sapiens
  source 1..23: mol_type = genomic RNA
ctcagataggacaattaagtgca

SEQ ID NO: 4213 - RNA, 23 nt, Homo sapiens
  source 1..23: mol_type = genomic RNA
cagataggacaattaagtgcact

SEQ ID NO: 4214 - RNA, 23 nt, Homo sapiens
  source 1..23: mol_type = genomic RNA
ttcccagtttacaggtctatact

SEQ ID NO: 4215 - RNA, 23 nt, Homo sapiens
  source 1..23: mol_type = genomic RNA
tattgagcttacttacttggacg

SEQ ID NO: 4216 - RNA, 23 nt, Homo sapiens
  source 1..23: mol_type = genomic RNA
tgagcttacttacttggacgcaa

SEQ ID NO: 4217 - RNA, 23 nt, Homo sapiens
  source 1..23: mol_type = genomic RNA
cttggacgcaacattgcaagcgc

SEQ ID NO: 4218 - RNA, 23 nt, Homo sapiens
  source 1..23: mol_type = genomic RNA
ttggacgcaacattgcaagcgct

SEQ ID NO: 4219 - RNA, 23 nt, Homo sapiens
  source 1..23: mol_type = genomic RNA
tggacgcaacattgcaagcgctg

SEQ ID NO: 4220 - RNA, 23 nt, Homo sapiens
  source 1..23: mol_type = genomic RNA
acgcaacattgcaagcgctgtga

SEQ ID NO: 4221 - RNA, 23 nt, Homo sapiens
  source 1..23: mol_type = genomic RNA
agaaatgaatgattgctttcgct

SEQ ID NO: 4222 - RNA, 23 nt, Homo sapiens
  source 1..23: mol_type = genomic RNA
gaaatgaatgattgctttcgctt

SEQ ID NO: 4223 - RNA, 23 nt, Homo sapiens
  source 1..23: mol_type = genomic RNA
tgaatgattgctttcgcttctac

SEQ ID NO: 4224 - RNA, 23 nt, Homo sapiens
  source 1..23: mol_type = genomic RNA
gaatgattgctttcgcttctaca

SEQ ID NO: 4225 - RNA, 23 nt, Homo sapiens
  source 1..23: mol_type = genomic RNA
aatgattgctttcgcttctacag

SEQ ID NO: 4226 - RNA, 23 nt, Homo sapiens
  source 1..23: mol_type = genomic RNA
gcattttagggttccattgtctt

SEQ ID NO: 4227 - RNA, 23 nt, Homo sapiens
  source 1..23: mol_type = genomic RNA
ccattgtcttggtggtgttacaa

SEQ ID NO: 4228 - RNA, 23 nt, Homo sapiens
  source 1..23: mol_type = genomic RNA
aatggtagtggaaattctatgcc

SEQ ID NO: 4229 - RNA, 23 nt, Homo sapiens
  source 1..23: mol_type = genomic RNA
acaccgctcttcaggttgtaaaa

SEQ ID NO: 4230 - RNA, 23 nt, Homo sapiens
  source 1..23: mol_type = genomic RNA
ttcatctagtgttaggcactata

SEQ ID NO: 4231 - RNA, 23 nt, Homo sapiens
  source 1..23: mol_type = genomic RNA
tcatctagtgttaggcactatag

SEQ ID NO: 4232 - RNA, 23 nt, Homo sapiens
  source 1..23: mol_type = genomic RNA
gtgttaggcactatagtatttat

SEQ ID NO: 4233 - RNA, 23 nt, Homo sapiens
  source 1..23: mol_type = genomic RNA
cttaaaaggtatcaatgtacctt

SEQ ID NO: 4234 - RNA, 23 nt, Homo sapiens
  source 1..23: mol_type = genomic RNA
ggcaggataatatagtgcaaatt

SEQ ID NO: 4235 - RNA, 23 nt, Homo sapiens
  source 1..23: mol_type = genomic RNA
atgagaagccatataatggcggt

SEQ ID NO: 4236 - RNA, 23 nt, Homo sapiens
  source 1..23: mol_type = genomic RNA
gagaagccatataatggcggttt

SEQ ID NO: 4237 - RNA, 23 nt, Homo sapiens
  source 1..23: mol_type = genomic RNA
tatgcagtactgcaagctaataa

SEQ ID NO: 4238 - RNA, 23 nt, Homo sapiens
  source 1..23: mol_type = genomic RNA
tactgcaagctaataacgttggt

SEQ ID NO: 4239 - RNA, 23 nt, Homo sapiens
  source 1..23: mol_type = genomic RNA
actgcaagctaataacgttggtt

SEQ ID NO: 4240 - RNA, 23 nt, Homo sapiens
  source 1..23: mol_type = genomic RNA
ctgcaagctaataacgttggttt

SEQ ID NO: 4241 - RNA, 23 nt, Homo sapiens
  source 1..23: mol_type = genomic RNA
gctaataacgttggtttgttatg

SEQ ID NO: 4242 - RNA, 23 nt, Homo sapiens
  source 1..23: mol_type = genomic RNA
agagaaagcccgctttagtcaat

SEQ ID NO: 4243 - RNA, 24 nt, Homo sapiens
  source 1..24: mol_type = genomic RNA
gagaaagcccgctttagtcaatac

SEQ ID NO: 4244 - RNA, 23 nt, Homo sapiens
  source 1..23: mol_type = genomic RNA
agaaagcccgctttagtcaatac

SEQ ID NO: 4245 - RNA, 23 nt, Homo sapiens
  source 1..23: mol_type = genomic RNA
aagcccgctttagtcaatacttt

SEQ ID NO: 4246 - RNA, 23 nt, Homo sapiens
  source 1..23: mol_type = genomic RNA
cagttgtctgcattaacctgttc

SEQ ID NO: 4247 - RNA, 23 nt, Homo sapiens
  source 1..23: mol_type = genomic RNA
ctgttcatacacccattttgtcc

SEQ ID NO: 4248 - RNA, 23 nt, Homo sapiens
  source 1..23: mol_type = genomic RNA
gttcatacacccattttgtccct

SEQ ID NO: 4249 - RNA, 23 nt, Homo sapiens
  source 1..23: mol_type = genomic RNA
ggccttataaatgcgagctgtgc

SEQ ID NO: 4250 - RNA, 23 nt, Homo sapiens
  source 1..23: mol_type = genomic RNA
gccttataaatgcgagctgtgca

SEQ ID NO: 4251 - RNA, 24 nt, Homo sapiens
  source 1..24: mol_type = genomic RNA
gccttataaatgcgagctgtgcaa

SEQ ID NO: 4252 - RNA, 24 nt, Homo sapiens
  source 1..24: mol_type = genomic RNA
cttataaatgcgagctgtgcaact

SEQ ID NO: 4253 - RNA, 23 nt, Homo sapiens
  source 1..23: mol_type = genomic RNA
ttataaatgcgagctgtgcaact

SEQ ID NO: 4254 - RNA, 23 nt, Homo sapiens
  source 1..23: mol_type = genomic RNA
tataaatgcgagctgtgcaacta

SEQ ID NO: 4255 - RNA, 23 nt, Homo sapiens
  source 1..23: mol_type = genomic RNA
ataaatgcgagctgtgcaactat

SEQ ID NO: 4256 - RNA, 23 nt, Homo sapiens
  source 1..23: mol_type = genomic RNA
taaatgcgagctgtgcaactatg

SEQ ID NO: 4257 - RNA, 23 nt, Homo sapiens
  source 1..23: mol_type = genomic RNA
aaatgcgagctgtgcaactatgc

SEQ ID NO: 4258 - RNA, 23 nt, Homo sapiens
  source 1..23: mol_type = genomic RNA
atgcgagctgtgcaactatgcct

SEQ ID NO: 4259 - RNA, 23 nt, Homo sapiens
  source 1..23: mol_type = genomic RNA
gcgagctgtgcaactatgcctgt

SEQ ID NO: 4260 - RNA, 23 nt, Homo sapiens
  source 1..23: mol_type = genomic RNA
gagctgtgcaactatgcctgtgc

SEQ ID NO: 4261 - RNA, 23 nt, Homo sapiens
  source 1..23: mol_type = genomic RNA
tggggaaggacgtttacaaatgt

SEQ ID NO: 4262 - RNA, 23 nt, Homo sapiens
  source 1..23: mol_type = genomic RNA
ggggaaggacgtttacaaatgtg

SEQ ID NO: 4263 - RNA, 23 nt, Homo sapiens
  source 1..23: mol_type = genomic RNA
atttgtaagatgccttttagcgt

SEQ ID NO: 4264 - RNA, 23 nt, Homo sapiens
  source 1..23: mol_type = genomic RNA
tttgtaagatgccttttagcgtg

SEQ ID NO: 4265 - RNA, 23 nt, Homo sapiens
  source 1..23: mol_type = genomic RNA
tgtaagatgccttttagcgtgta

SEQ ID NO: 4266 - RNA, 23 nt, Homo sapiens
  source 1..23: mol_type = genomic RNA
gtaagatgccttttagcgtgtac

SEQ ID NO: 4267 - RNA, 23 nt, Homo sapiens
  source 1..23: mol_type = genomic RNA
taagatgccttttagcgtgtaca

SEQ ID NO: 4268 - RNA, 23 nt, Homo sapiens
  source 1..23: mol_type = genomic RNA
agatgccttttagcgtgtacagt

SEQ ID NO: 4269 - RNA, 23 nt, Homo sapiens
  source 1..23: mol_type = genomic RNA
gatgccttttagcgtgtacagta

SEQ ID NO: 4270 - RNA, 23 nt, Homo sapiens
  source 1..23: mol_type = genomic RNA
atgccttttagcgtgtacagtac

SEQ ID NO: 4271 - RNA, 23 nt, Homo sapiens
  source 1..23: mol_type = genomic RNA
tgccttttagcgtgtacagtacc

SEQ ID NO: 4272 - RNA, 23 nt, Homo sapiens
  source 1..23: mol_type = genomic RNA
gccttttagcgtgtacagtaccc

SEQ ID NO: 4273 - RNA, 23 nt, Homo sapiens
  source 1..23: mol_type = genomic RNA
ccttttagcgtgtacagtaccct

SEQ ID NO: 4274 - RNA, 23 nt, Homo sapiens
  source 1..23: mol_type = genomic RNA
cttttagcgtgtacagtaccctg

SEQ ID NO: 4275 - RNA, 23 nt, Homo sapiens
  source 1..23: mol_type = genomic RNA
ttttagcgtgtacagtaccctgg

SEQ ID NO: 4276 - RNA, 23 nt, Homo sapiens
  source 1..23: mol_type = genomic RNA
tttagcgtgtacagtaccctgga

SEQ ID NO: 4277 - RNA, 23 nt, Homo sapiens
  source 1..23: mol_type = genomic RNA
ttagcgtgtacagtaccctggag

SEQ ID NO: 4278 - RNA, 23 nt, Homo sapiens
  source 1..23: mol_type = genomic RNA
ttagcgtgtacagtaccctggag

SEQ ID NO: 4279 - RNA, 23 nt, Homo sapiens
  source 1..23: mol_type = genomic RNA
cgtgtacagtaccctggagaaac

SEQ ID NO: 4280 - RNA, 23 nt, Homo sapiens
  source 1..23: mol_type = genomic RNA
aaatggcacagtgatcgagtgtt

SEQ ID NO: 4281 - RNA, 23 nt, Homo sapiens
  source 1..23: mol_type = genomic RNA
aatggcacagtgatcgagtgttg

SEQ ID NO: 4282 - RNA, 23 nt, Homo sapiens
  source 1..23: mol_type = genomic RNA
ggcacagtgatcgagtgttgaat

SEQ ID NO: 4283 - RNA, 23 nt, Homo sapiens
  source 1..23: mol_type = genomic RNA
gcacagtgatcgagtgttgaata

SEQ ID NO: 4284 - RNA, 23 nt, Homo sapiens
  source 1..23: mol_type = genomic RNA
cacagtgatcgagtgttgaataa

SEQ ID NO: 4285 - RNA, 23 nt, Homo sapiens
  source 1..23: mol_type = genomic RNA
acagtgatcgagtgttgaataat

SEQ ID NO: 4286 - RNA, 23 nt, Homo sapiens
  source 1..23: mol_type = genomic RNA
cagtgatcgagtgttgaataatg

SEQ ID NO: 4287 - RNA, 23 nt, Homo sapiens
  source 1..23: mol_type = genomic RNA
tggcagggaacacgtctagccca

SEQ ID NO: 4288 - RNA, 23 nt, Homo sapiens
  source 1..23: mol_type = genomic RNA
atttcagagcaacctggtggtgc

SEQ ID NO: 4289 - RNA, 23 nt, Homo sapiens
  source 1..23: mol_type = genomic RNA
ccatgacggtcaagtccgacgac

SEQ ID NO: 4290 - RNA, 23 nt, Homo sapiens
  source 1..23: mol_type = genomic RNA
catgacggtcaagtccgacgacg

SEQ ID NO: 4291 - RNA, 23 nt, Homo sapiens
  source 1..23: mol_type = genomic RNA
tgacggtcaagtccgacgacggt

SEQ ID NO: 4292 - RNA, 23 nt, Homo sapiens
  source 1..23: mol_type = genomic RNA
gtcaagtccgacgacggtctctc

SEQ ID NO: 4293 - RNA, 23 nt, Homo sapiens
  source 1..23: mol_type = genomic RNA
cgcgctcaagtccgtggtggcca

SEQ ID NO: 4294 - RNA, 23 nt, Homo sapiens
  source 1..23: mol_type = genomic RNA
gctcaagtccgtggtggccaagt

SEQ ID NO: 4295 - RNA, 23 nt, Homo sapiens
  source 1..23: mol_type = genomic RNA
cgtggtggccaagttcaagagcg

SEQ ID NO: 4296 - RNA, 23 nt, Homo sapiens
  source 1..23: mol_type = genomic RNA
gtggtggccaagttcaagagcga

SEQ ID NO: 4297 - RNA, 23 nt, Homo sapiens
  source 1..23: mol_type = genomic RNA
agaggaggacgacgaggaagagg

SEQ ID NO: 4298 - RNA, 23 nt, Homo sapiens
  source 1..23: mol_type = genomic RNA
aggaggacgacgaggaagaggaa

SEQ ID NO: 4299 - RNA, 23 nt, Homo sapiens
  source 1..23: mol_type = genomic RNA
cgcatcaagctcgagaaggagtt

SEQ ID NO: 4300 - RNA, 23 nt, Homo sapiens
  source 1..23: mol_type = genomic RNA
gcatcaagctcgagaaggagttc

SEQ ID NO: 4301 - RNA, 23 nt, Homo sapiens
  source 1..23: mol_type = genomic RNA
atcaagctcgagaaggagttcga

SEQ ID NO: 4302 - RNA, 23 nt, Homo sapiens
  source 1..23: mol_type = genomic RNA
cttccttagcttcggagactcca

SEQ ID NO: 4303 - RNA, 23 nt, Homo sapiens
  source 1..23: mol_type = genomic RNA
ttccttagcttcggagactccag

SEQ ID NO: 4304 - RNA, 23 nt, Homo sapiens
  source 1..23: mol_type = genomic RNA
cttagcttcggagactccagaca

SEQ ID NO: 4305 - RNA, 23 nt, Homo sapiens
  source 1..23: mol_type = genomic RNA
ttagcttcggagactccagacaa

SEQ ID NO: 4306 - RNA, 23 nt, Homo sapiens
  source 1..23: mol_type = genomic RNA
tagcttcggagactccagacaat

SEQ ID NO: 4307 - RNA, 23 nt, Homo sapiens
  source 1..23: mol_type = genomic RNA
agcttcggagactccagacaatc

SEQ ID NO: 4308 - RNA, 23 nt, Homo sapiens
  source 1..23: mol_type = genomic RNA
ttttgcctcctcgtcggagcact

SEQ ID NO: 4309 - RNA, 23 nt, Homo sapiens
  source 1..23: mol_type = genomic RNA
tttgcctcctcgtcggagcactc

SEQ ID NO: 4310 - protein, 461 aa, synthetic construct
MGWSCIILFLVATATGVHSEVQLVQSGAEVKKPGASVKVSCKASGYTFTSYWMHWVRQAPGQRLEWIGEINPTNGRTNYIEKFKSRATLTVDKSASTAYMELSSLRSEDTAVYYCARGTRAYHYWGQGTMVTVSSASTKGPSVFPLAPCSRSTSESTAALGCLVKDYFPEPVTVSWNSGALTSGVHTFPAVLQSSGLYSLSSVVTVPSSSLGTKTYTCNVDHKPSNTKVDKRVESKYGPPCPPCPAPEFEGGPSVFLFPPKPKDTLMISRTPEVTCVVVDVSQEDPEVQFNWYVDGVEVHNAKTKPREEQFNSTYRVVSVLTVLHQDWLNGKEYKCKVSNKGLPSSIEKTISKAKGQPREPQVYTLPPSQEEMTKNQVSLTCLVKGFYPSDIAVEWESNGQPENNYKTTPPVLDSDGSFFLYSRLTVDKSRWQEGNVFSCSVMHEALHNHYTQKSLSLSLG

SEQ ID NO: 4311 - protein, 116 aa, synthetic construct
QVQLVQSGAEVKKPGASVKVSCKASGYTFTNYWMHWVRQAPGQGLEWMGEINPINGRSNYAQKFQGRVTLTVDTSISTAYMELSRLRSDDTAVYYCARGTRAMHYWGQGTLVTVSS

SEQ ID NO: 4312 - protein, 107 aa, synthetic construct
DIQMTQSPSSLSASVGDRVTITCRTSENIYNNLAWYQQKPGKSPKLLIYAATNLADGVPSRFSGSGSGTDYTLTISSLQPEDFATYYCQHFWGTPLTFGGGTKVEIK

SEQ ID NO: 4313 - protein, 17 aa, synthetic construct
EINPINGRSNYAEKFQG

SEQ ID NO: 4314 - RNA, 23 nt, Homo sapiens
  source 1..23: mol_type = genomic RNA
ccgtggtggccaagttcaagagc

SEQ ID NO: 4315 - RNA, 23 nt, Homo sapiens
  source 1..23: mol_type = genomic RNA
gatgaaccagaccacggcccgtt

SEQ ID NO: 4316 - RNA, 23 nt, Homo sapiens
  source 1..23: mol_type = genomic RNA
gtgctgcggttgaatccaatggc

SEQ ID NO: 4317 - RNA, 23 nt, Homo sapiens
  source 1..23: mol_type = genomic RNA
cgtccgcacttgaacttgcagct

SEQ ID NO: 4318 - RNA, 23 nt, Homo sapiens
  source 1..23: mol_type = genomic RNA
cggttgaatccaatggctatgga

SEQ ID NO: 4319 - RNA, 23 nt, Homo sapiens
  source 1..23: mol_type = genomic RNA
tggccaagttcaagagcgagaac

SEQ ID NO: 4320 - RNA, 23 nt, Homo sapiens
  source 1..23: mol_type = genomic RNA
agaactgtagcaatctcactgtc

SEQ ID NO: 4321 - RNA, 23 nt, Homo sapiens
  source 1..23: mol_type = genomic RNA
ggtcctgggcgagaagcataagc

SEQ ID NO: 4322 - RNA, 23 nt, Homo sapiens
  source 1..23: mol_type = genomic RNA
acccggctctcccgatgtgaacc

SEQ ID NO: 4323 - RNA, 23 nt, Homo sapiens
  source 1..23: mol_type = genomic RNA
atcttccctgcgccatctttgta

SEQ ID NO: 4324 - RNA, 23 nt, Homo sapiens
  source 1..23: mol_type = genomic RNA
gcaatggcagcctctgcttagaa

SEQ ID NO: 4325 - RNA, 23 nt, Homo sapiens
  source 1..23: mol_type = genomic RNA
ggcaagacgttcaaatttcagag

SEQ ID NO: 4326 - RNA, 23 nt, Homo sapiens
  source 1..23: mol_type = genomic RNA
ggcccgggcaggcccagctcaaa

SEQ ID NO: 4327 - RNA, 23 nt, Homo sapiens
  source 1..23: mol_type = genomic RNA
aggcagctcaaagatcccttcct

SEQ ID NO: 4328 - RNA, 23 nt, Homo sapiens
  source 1..23: mol_type = genomic RNA
tgcgagctgtgcaactatgcctg

SEQ ID NO: 4329 - RNA, 23 nt, Homo sapiens
  source 1..23: mol_type = genomic RNA
ttgacagggtgctgcggttgaat

SEQ ID NO: 4330 - RNA, 23 nt, Homo sapiens
  source 1..23: mol_type = genomic RNA
ttgaatccaatggctatggagcc

SEQ ID NO: 4331 - RNA, 23 nt, Homo sapiens
  source 1..23: mol_type = genomic RNA
tgtgcaactatgcctgtgcccag

SEQ ID NO: 4332 - RNA, 23 nt, Homo sapiens
  source 1..23: mol_type = genomic RNA
ccatcacccgagtgcctttgaca

SEQ ID NO: 4333 - RNA, 23 nt, Homo sapiens
  source 1..23: mol_type = genomic RNA
gccctggccacccatcacccgag

SEQ ID NO: 4334 - RNA, 23 nt, Homo sapiens
  source 1..23: mol_type = genomic RNA
acaattcatcttccctgcgccat

SEQ ID NO: 4335 - RNA, 23 nt, Homo sapiens
  source 1..23: mol_type = genomic RNA
ttccctgcgccatctttgtatta

SEQ ID NO: 4336 - RNA, 23 nt, Homo sapiens
  source 1..23: mol_type = genomic RNA
ggccacccatcacccgagtgcct

SEQ ID NO: 4337 - RNA, 23 nt, Homo sapiens
  source 1..23: mol_type = genomic RNA
catggtttctcttgcaacacgca

SEQ ID NO: 4338 - RNA, 23 nt, Homo sapiens
  source 1..23: mol_type = genomic RNA
gcggcctccaggcagctcaaaga

SEQ ID NO: 4339 - RNA, 23 nt, Homo sapiens
  source 1..23: mol_type = genomic RNA
atgtctcgccgcaagcaaggcaa

SEQ ID NO: 4340 - RNA, 23 nt, Homo sapiens
  source 1..23: mol_type = genomic RNA
gcctttgacagggtgctgcggtt

SEQ ID NO: 4341 - RNA, 23 nt, Homo sapiens
  source 1..23: mol_type = genomic RNA
aattcatcttccctgcgccatct

SEQ ID NO: 4342 - RNA, 23 nt, Homo sapiens
  source 1..23: mol_type = genomic RNA
gtgctgcggttgaatccaatggc

SEQ ID NO: 4343 - RNA, 23 nt, Homo sapiens
  source 1..23: mol_type = genomic RNA
gtaaagatgagcccagcagctac

SEQ ID NO: 4344 - RNA, 23 nt, Homo sapiens
  source 1..23: mol_type = genomic RNA
cgtccgcacttgaacttgcagct

SEQ ID NO: 4345 - RNA, 23 nt, Homo sapiens
  source 1..23: mol_type = genomic RNA
ccgagtgcctttgacagggtgct

SEQ ID NO: 4346 - RNA, 23 nt, Homo sapiens
  source 1..23: mol_type = genomic RNA
cggttgaatccaatggctatgga

SEQ ID NO: 4347 - RNA, 23 nt, Homo sapiens
  source 1..23: mol_type = genomic RNA
aaagagggcagacgcagcgacac

SEQ ID NO: 4348 - RNA, 23 nt, Homo sapiens
  source 1..23: mol_type = genomic RNA
agaactgtagcaatctcactgtc

SEQ ID NO: 4349 - RNA, 23 nt, Homo sapiens
  source 1..23: mol_type = genomic RNA
tcatcttccctgcgccatctttg

SEQ ID NO: 4350 - RNA, 23 nt, Homo sapiens
  source 1..23: mol_type = genomic RNA
acccggctctcccgatgtgaacc

SEQ ID NO: 4351 - RNA, 23 nt, Homo sapiens
  source 1..23: mol_type = genomic RNA
ccattcttacagatgatgaacca

SEQ ID NO: 4352 - RNA, 23 nt, Homo sapiens
  source 1..23: mol_type = genomic RNA
atcttccctgcgccatctttgta

SEQ ID NO: 4353 - RNA, 23 nt, Homo sapiens
  source 1..23: mol_type = genomic RNA
catcacccgagtgcctttgacag

SEQ ID NO: 4354 - RNA, 23 nt, Homo sapiens
  source 1..23: mol_type = genomic RNA
gcaatggcagcctctgcttagaa

SEQ ID NO: 4355 - RNA, 23 nt, Homo sapiens
  source 1..23: mol_type = genomic RNA
aacgtcatctagaggaatttgcc

SEQ ID NO: 4356 - RNA, 23 nt, Homo sapiens
  source 1..23: mol_type = genomic RNA
ggcaagacgttcaaatttcagag

SEQ ID NO: 4357 - RNA, 23 nt, Homo sapiens
  source 1..23: mol_type = genomic RNA
ctgtgcaactatgcctgtgccca

SEQ ID NO: 4358 - RNA, 23 nt, Homo sapiens
  source 1..23: mol_type = genomic RNA
acggctctcccacaattcatctt

SEQ ID NO: 4359 - RNA, 23 nt, Homo sapiens
  source 1..23: mol_type = genomic RNA
ggcccgggcaggcccagctcaaa

SEQ ID NO: 4360 - RNA, 23 nt, Homo sapiens
  source 1..23: mol_type = genomic RNA
cttaagcaaacgggaattctcgc

SEQ ID NO: 4361 - RNA, 23 nt, Homo sapiens
  source 1..23: mol_type = genomic RNA
atggccctggccacccatcaccc

SEQ ID NO: 4362 - RNA, 23 nt, Homo sapiens
  source 1..23: mol_type = genomic RNA
tgcgagctgtgcaactatgcctg

SEQ ID NO: 4363 - RNA, 23 nt, Homo sapiens
  source 1..23: mol_type = genomic RNA
ggagaagccacacgggcgaaagg

SEQ ID NO: 4364 - RNA, 23 nt, Homo sapiens
  source 1..23: mol_type = genomic RNA
ttgacagggtgctgcggttgaat

SEQ ID NO: 4365 - RNA, 23 nt, Homo sapiens
  source 1..23: mol_type = genomic RNA
aacccggctctcccgatgtgaac

SEQ ID NO: 4366 - RNA, 23 nt, Homo sapiens
  source 1..23: mol_type = genomic RNA
caggagaagccacacgggcgaaa

SEQ ID NO: 4367 - RNA, 23 nt, Homo sapiens
  source 1..23: mol_type = genomic RNA
ttgaatccaatggctatggagcc

SEQ ID NO: 4368 - RNA, 23 nt, Homo sapiens
  source 1..23: mol_type = genomic RNA
aatgcaatggcagcctctgctta

SEQ ID NO: 4369 - RNA, 23 nt, Homo sapiens
  source 1..23: mol_type = genomic RNA
tgtgcaactatgcctgtgcccag

SEQ ID NO: 4370 - RNA, 23 nt, Homo sapiens
  source 1..23: mol_type = genomic RNA
gagcactcctcggagaacgggag

SEQ ID NO: 4371 - RNA, 23 nt, Homo sapiens
  source 1..23: mol_type = genomic RNA
ccatcacccgagtgcctttgaca

SEQ ID NO: 4372 - RNA, 23 nt, Homo sapiens
  source 1..23: mol_type = genomic RNA
gacagggtgctgcggttgaatcc

SEQ ID NO: 4373 - RNA, 23 nt, Homo sapiens
  source 1..23: mol_type = genomic RNA
gccctggccacccatcacccgag

SEQ ID NO: 4374 - RNA, 23 nt, Homo sapiens
  source 1..23: mol_type = genomic RNA
tttatcgagcacaaacggaaaca

SEQ ID NO: 4375 - RNA, 23 nt, Homo sapiens
  source 1..23: mol_type = genomic RNA
acaattcatcttccctgcgccat

SEQ ID NO: 4376 - RNA, 23 nt, Homo sapiens
  source 1..23: mol_type = genomic RNA
ccctccctcctctgcaatccgcc

SEQ ID NO: 4377 - RNA, 23 nt, Homo sapiens
  source 1..23: mol_type = genomic RNA
ttccctgcgccatctttgtatta

SEQ ID NO: 4378 - RNA, 23 nt, Homo sapiens
  source 1..23: mol_type = genomic RNA
ggccacccatcacccgagtgcct

SEQ ID NO: 4379 - RNA, 23 nt, Homo sapiens
  source 1..23: mol_type = genomic RNA
tctccttctttctaacccggctc

SEQ ID NO: 4380 - RNA, 23 nt, Homo sapiens
  source 1..23: mol_type = genomic RNA
catggtttctcttgcaacacgca

SEQ ID NO: 4381 - RNA, 23 nt, Homo sapiens
  source 1..23: mol_type = genomic RNA
agccatgacggctctcccacaat

SEQ ID NO: 4382 - RNA, 23 nt, Homo sapiens
  source 1..23: mol_type = genomic RNA
gcggcctccaggcagctcaaaga

SEQ ID NO: 4383 - RNA, 23 nt, Homo sapiens
  source 1..23: mol_type = genomic RNA
cctttgacagggtgctgcggttg

SEQ ID NO: 4384 - RNA, 23 nt, Homo sapiens
  source 1..23: mol_type = genomic RNA
ccgcgggttggtatcccttcagg

SEQ ID NO: 4385 - RNA, 23 nt, Homo sapiens
  source 1..23: mol_type = genomic RNA
atgtctcgccgcaagcaaggcaa

SEQ ID NO: 4386 - RNA, 23 nt, Homo sapiens
  source 1..23: mol_type = genomic RNA
gctgtgcaactatgcctgtgccc

SEQ ID NO: 4387 - RNA, 23 nt, Homo sapiens
  source 1..23: mol_type = genomic RNA
gggtgctgcggttgaatccaatg

SEQ ID NO: 4388 - RNA, 23 nt, Homo sapiens
  source 1..23: mol_type = genomic RNA
gcctttgacagggtgctgcggtt

SEQ ID NO: 4389 - RNA, 23 nt, Homo sapiens
  source 1..23: mol_type = genomic RNA
cccagcacttaagcaaacgggaa

SEQ ID NO: 4390 - RNA, 23 nt, Homo sapiens
  source 1..23: mol_type = genomic RNA
aattcatcttccctgcgccatct

SEQ ID NO: 4391 - RNA, 23 nt, Homo sapiens
  source 1..23: mol_type = genomic RNA
ggttgaatccaatggctatggag

SEQ ID NO: 4392 - RNA, 23 nt, Homo sapiens
  source 1..23: mol_type = genomic RNA
gcctggcagaagggcgctttcca

SEQ ID NO: 4393 - RNA, 23 nt, Homo sapiens
  source 1..23: mol_type = genomic RNA
tgggatgagtgcagaatatgccc

SEQ ID NO: 4394 - RNA, 23 nt, Homo sapiens
  source 1..23: mol_type = genomic RNA
gtaaagatgagcccagcagctac

SEQ ID NO: 4395 - RNA, 23 nt, Homo sapiens
  source 1..23: mol_type = genomic RNA
agtctccttctttctaacccggc

SEQ ID NO: 4396 - RNA, 23 nt, Homo sapiens
  source 1..23: mol_type = genomic RNA
ccgagtgcctttgacagggtgct

SEQ ID NO: 4397 - RNA, 23 nt, Homo sapiens
  source 1..23: mol_type = genomic RNA
aaagagggcagacgcagcgacac

SEQ ID NO: 4398 - RNA, 23 nt, Homo sapiens
  source 1..23: mol_type = genomic RNA
ctggagtctccttctttctaacc

SEQ ID NO: 4399 - RNA, 23 nt, Homo sapiens
  source 1..23: mol_type = genomic RNA
tcatcttccctgcgccatctttg

SEQ ID NO: 4400 - RNA, 23 nt, Homo sapiens
  source 1..23: mol_type = genomic RNA
ccattcttacagatgatgaacca

SEQ ID NO: 4401 - RNA, 23 nt, Homo sapiens
  source 1..23: mol_type = genomic RNA
catcacccgagtgcctttgacag

SEQ ID NO: 4402 - RNA, 23 nt, Homo sapiens
  source 1..23: mol_type = genomic RNA
aacgtcatctagaggaatttgcc

SEQ ID NO: 4403 - RNA, 23 nt, Homo sapiens
  source 1..23: mol_type = genomic RNA
ctgtgcaactatgcctgtgccca

SEQ ID NO: 4404 - RNA, 23 nt, Homo sapiens
  source 1..23: mol_type = genomic RNA
acggctctcccacaattcatctt

SEQ ID NO: 4405 - RNA, 23 nt, Homo sapiens
  source 1..23: mol_type = genomic RNA
cttaagcaaacgggaattctcgc

SEQ ID NO: 4406 - RNA, 23 nt, Homo sapiens
  source 1..23: mol_type = genomic RNA
atggccctggccacccatcaccc

SEQ ID NO: 4407 - RNA, 23 nt, Homo sapiens
  source 1..23: mol_type = genomic RNA
ggagaagccacacgggcgaaagg

SEQ ID NO: 4408 - RNA, 23 nt, Homo sapiens
  source 1..23: mol_type = genomic RNA
aacccggctctcccgatgtgaac

SEQ ID NO: 4409 - RNA, 23 nt, Homo sapiens
  source 1..23: mol_type = genomic RNA
caggagaagccacacgggcgaaa

SEQ ID NO: 4410 - RNA, 23 nt, Homo sapiens
  source 1..23: mol_type = genomic RNA
aatgcaatggcagcctctgctta

SEQ ID NO: 4411 - RNA, 23 nt, Homo sapiens
  source 1..23: mol_type = genomic RNA
gagcactcctcggagaacgggag

SEQ ID NO: 4412 - RNA, 23 nt, Homo sapiens
  source 1..23: mol_type = genomic RNA
gacagggtgctgcggttgaatcc

SEQ ID NO: 4413 - RNA, 23 nt, Homo sapiens
  source 1..23: mol_type = genomic RNA
tttatcgagcacaaacggaaaca

SEQ ID NO: 4414 - RNA, 23 nt, Homo sapiens
  source 1..23: mol_type = genomic RNA
ccctccctcctctgcaatccgcc

SEQ ID NO: 4415 - RNA, 23 nt, Homo sapiens
  source 1..23: mol_type = genomic RNA
tctccttctttctaacccggctc

SEQ ID NO: 4416 - RNA, 23 nt, Homo sapiens
  source 1..23: mol_type = genomic RNA
agccatgacggctctcccacaat

SEQ ID NO: 4417 - RNA, 23 nt, Homo sapiens
  source 1..23: mol_type = genomic RNA
cctttgacagggtgctgcggttg

SEQ ID NO: 4418 - RNA, 23 nt, Homo sapiens
  source 1..23: mol_type = genomic RNA
ccgcgggttggtatcccttcagg

SEQ ID NO: 4419 - RNA, 23 nt, Homo sapiens
  source 1..23: mol_type = genomic RNA
gctgtgcaactatgcctgtgccc

SEQ ID NO: 4420 - RNA, 23 nt, Homo sapiens
  source 1..23: mol_type = genomic RNA
gggtgctgcggttgaatccaatg

SEQ ID NO: 4421 - RNA, 23 nt, Homo sapiens
  source 1..23: mol_type = genomic RNA
cccagcacttaagcaaacgggaa

SEQ ID NO: 4422 - RNA, 23 nt, Homo sapiens
  source 1..23: mol_type = genomic RNA
ggttgaatccaatggctatggag

SEQ ID NO: 4423 - RNA, 23 nt, Homo sapiens
  source 1..23: mol_type = genomic RNA
gcctggcagaagggcgctttcca

SEQ ID NO: 4424 - RNA, 23 nt, Homo sapiens
  source 1..23: mol_type = genomic RNA
tgggatgagtgcagaatatgccc

SEQ ID NO: 4425 - RNA, 23 nt, Homo sapiens
  source 1..23: mol_type = genomic RNA
agtctccttctttctaacccggc

SEQ ID NO: 4426 - RNA, 23 nt, Homo sapiens
  source 1..23: mol_type = genomic RNA
ctggagtctccttctttctaacc

SEQ ID NO: 4427 - RNA, 23 nt, Homo sapiens
  source 1..23: mol_type = genomic RNA
ccttataaatgcgagctgtgcaa

SEQ ID NO: 4428 - RNA, 23 nt, Homo sapiens
  source 1..23: mol_type = genomic RNA
gatgaaccagaccacggcccgtt

SEQ ID NO: 4429 - RNA, 23 nt, Homo sapiens
  source 1..23: mol_type = genomic RNA
tggccaagttcaagagcgagaac

SEQ ID NO: 4430 - RNA, 23 nt, Homo sapiens
  source 1..23: mol_type = genomic RNA
ccgtggtggccaagttcaagagc

SEQ ID NO: 4431 - RNA, 23 nt, Homo sapiens
  source 1..23: mol_type = genomic RNA
ggtcctgggcgagaagcataagc

SEQ ID NO: 4432 - RNA, 23 nt, Homo sapiens
  source 1..23: mol_type = genomic RNA
aggcagctcaaagatcccttcct

SEQ ID NO: 4433 - RNA, 21 nt, Homo sapiens
  source 1..21: mol_type = genomic RNA
tatgcaaaggttactgcaacc
